United States Patent Application Publication US 2026/0191916 A1 - sequence listing, part 13

SEQ ID NO: 15 - DNA, 3800051 bp, Blautia massiliensis (residues 1-1,900,026 of 3,800,051)
  source 1..3800051: mol_type = genomic DNA
atggacgctgttattgaaaaatgggaggagatcctgcaaactgtcaaatctgaatatgaggtgactgatgtcccttttaatacctggctcaagccgctgaaagtttatgaggttgacggaaagctgataacagtggttgttccctctgaacaggcagcgatcggagtcaattacatcagtaaacgctacaaaatacccctccaggttactatctgtgtgctgacaggcatggaagaatgcgaggttcgcttcgttctggaaaaagatctccccaaaaaaacagaaaaaaacacttcttatgataaacaggttcaggatacacgttacgaagaggcgcatttaaatccaaaatacaccttcgacaccttcgttgtaggaagtaataacaaattcgcccaggccgcagctcttgcagttgccgaatcaccgggagatacctacaatccactgtttatctatggcggagccggtcttggtaagacgcatcttatgcattccatcgctcatttcattctggaacacgacgaaaacagccgtgttttgtatgtaaccagtgaggaatttaccaacgagctgatcgaaaccatccgaaacggaaataacacggcaatgagcaaattccgtgaaaaatacagaaatatcgacgttcttcttgtcgatgatattcagtttattataggaaaagaatccacacaggaggaatttttccatacatttaacagtcttcacagtgccaaaaagcagatcatcatatcctctgataaaccaccgaaggatatggagatcctggaagagcgcttccgttcccggttcgagtggggtctgatcgcagatatcacgctgcctgattacgaaacccgaatggcgatccttcataaaaatgaagaaatgaacggctacaacatcagtgaagatgttatcaaatatatcgctaccaatatcaaatccaatatccgtgagctggaaggtgccttcaacaaggtcatggccggagccaagcttgagaaaaaggaagtaactctggagctggcagagcaggcactgaaggatattatttctccggatgagaaaaaagtgatcacaccggaatacatcatctccgttgttgcagagcattacggagtcacacctgcggacttaagcggaaacaaacgaaactccaagatcgtcatgccccgccaggtttccatgtatctctgccgtgagatcatatccacacctttgaaaaatatcggaaaagcgctcggaaaccgtgaccataccaccgttatgcacggtattgaaaagatcgaaaacgaattgcagaacgacgataacttaaaaaataccattgatatattgaaaaagaagattaatccacaaggttagggaagttttccacattactggtgtataacgtgttgattgtatgtggagagatgtgtacaacttttttgccaaaacgcggcggtaattttatccccgggttattcacatgcgaaaataccacttttacacaaagttatcccaacggaaaacccctgaaaacatcaggcctgcgggagtttttcacaaaatctggccccctacggcggttactgcggattttttctataaatatatttataaaaaccacaaattgttcagaaagggagttatacacactatgaaaatcatctgctccaaatcaagtctgttaaaaagtgtaagtatcgcactcaaagcagttccatcaaaaaccacaatgccaatcctggaatgtattctcatggatgcaaccacaaaccagatcaaatttaccaccaacgatatggagctgggaattgaaaccatcgttgagggtactattgaagaaaaaggtaaagttgctcttgatgcaaaaatcttctatgaaatcatcagacgacttccggataatgatgttaccattaagaccgatgataaatatgcagcaaccattacctgtgaaaaagcaaaattcaatatccctggaaaatcaggagaagattttgcttatttaccgatgatcgagaaggatgaaccgctgacaatctctcagtacacactgaaagaaatgatccgccagactattttttcgattgctgtaaatgaaaacaataagcttatgaccggtgaactttttgagatcaaaaataactgtctgaaggtagtttctctggacggacatcgtatctctatccgcaaaatgtctcttaagaaagattattctgaccgtaaggtggtagttccgggcaaaactttaagcgaggtcagcaagatcctttccggagaagtggatgatcaggtcagcatttactttacaaaaaaccatattttatttgaatttgatcagactatggtagtttccagactgatcgagggagaatatttcagaattgatcagatgctttccagtgattatgagacaaaactgaagatcaacaaaaaagagttcctggattgtatcgaccgtgccacacttctggtacgtgaggttgataaaaaaccgatcatcatcaacatcacagacgatgatatggagctgcgcattgattctgcaatgggttccatgaatgaagagatcgatattgaaaaagagggtaaggatatcatgatcggcttcaacccgaaattcctgatcgatgcgcttcgtgttattgatgatgaaaccgtgacgatctatcttgtaaatccgaaggcaccatgctttatccgtgacgatgaggagaactatacttacctgatccttcctgtaaacatcaaccagaatcaggccagataagacctgggaaatataaggaataagggacaagagatgtacgcagcagcttcgggaatgtgagtgtacgtgtgagacgcacatgcttgaagctgtgaacagaattgagctcggcagtcaggatatgtaagtgtccgtagggtacgtacagcctgacggcagatatcaggattgatataaacggatacaccaaaaatgcgtgaccgtttttgaccgattgtatatgggaatgcgatcgtgttctgagaattgtttcatgtgtaaactgctggaagggggtatttaaattaccaccttccggtgaaatttgtattttgggggattttaaataccgccagaagatcagaaaagatcgatctgacggagaaaataccccggagataagaggagaaaaaattggagatcagaattaaagacgaatttatcaagcttggccaggcgctgaagctggccggtgttgtggaggacggcgttgaggcgaaatatgccatcaatgatggtctggtactggtgaacggtgaggtggagaaccgccgtggccgcaagatccatcctggagataccatttcctacgatggaaaagatatttatgtgatcgggtgaaggaatgtacattgaatccatcagactgaataatttcaggaattatgagtcgctggagatgaattttgatcagggcaccaatattctctacggcgacaatgcccagggaaagaccaatatcctggaggcggtttatctggcaggtaccagcaaatcccacaagggaagcaaggaccgggagatgatccgctttgagaatgaggaatcccatatccgaatgatggtgaagaagggcgatctttcatacaaaatagacatgcacctccggaaaaacaaagcaaagggagttgccatcaacgggctgccgatccgcaaggcaagggagctgctgggggtggtgaatctggtgtttttttctccggaggatcttaatattatcaagaatggaccgggagagagaagacgttttctggattcggagctttgtcagctggatggtgtttatatcacggagctggccggctacaatcacatcgtgaaccagagaaaccgtcttctcaaagactgttatatgaaccccgggctgaaaagtaccctggatgtctgggatatgcagatggtcgattacggaaagaagatcatcgggaagcgagaagcctttgtggaggagcttaacgagatcgcaagggggcttcataaggggcttaccggcggaatcgaggagctggagatcctgtacgagccaagtgtgacggcggcggagtttgaggataagctttccaggaaccgggagcgggatcttcggatgaagctgacctccgtgggaccgcacagagatgatttctgcgtaaaggtcaacgggattgacatccggaggtatggttcccaggggcagcagaggactgcggccctttccctgaagctttcggagatctatctggtgaagaaaaagatccgggatacaccggttcttctgctggatgatgttctttcggagctggatagcagcaggcagacatatctgctggaaagcatccacgatatacagactctgatcacctgtacaggactggatgattttgtcagccatcagttcaagatcaacagggtttttcaggtggtaaaggggcatgtttatatgcctaaagggttttgacaagcccgtatgcatatggtaaactgattctgattatggaaagttggtgaatattttggataaagaggagtttcgcgttaagctgggacagatcaataagctggtcgagacccaggattacaaaggcgccatgcagattgtggacagcattgactggcgtcgtgtgaaaaacgtccgtaccctttgtgtagtgggcgagatctacgcggccaacaagcgctatgaagagagcaaggaaatttttcttcttgcctaccacagagcgccgatcggcaagaacatactttaccgtctgatcgaggtttccctgaaaatgggacagatcagtgaagccacagaattctttgatgaatacagagaagtggcaggtaatgataacagccagtatatactgaaatataagatcgccagagcgaagaatgcatctctgaatgaacagatccgtattcttgaggaatataaggagaaggaatttacggagcgctggtcctatgagctggccaagctctattacaaggcaggagacaagcagaagtgcctggatctctgcaatgagatgatcctttggttcaatgacggaacttatgtgatgaaggcccttgacctgaaacagcggatgggtgttctcactggcgaagagaaagagaaatacgaacagcgttttatcccgaagctgatcccgccggaaaaggcgcaggagatcagggagagcaaggaagcatccggcgagtatgaggaggcaaaaccggtcacagatactatccaggtagatgatgagcgggatctgaacagtgcggagacattccaggagaagctttccaagggattccgtgatatctttggcggacataagaaatctgcggaagaggatatggaggaaaaagaagctgcgcaggatgaagagcaggatgaggtttccacaggctctgaggatgtgacggaacaggcggaagcgccggaggctgagactgctgcggcagcagaaccgtcagaggagtttacagattctgaggagatcgaagcagcagaaggaagtgaggaagcttcggatgagccttctgaagagcaggaagagttttccggacaggaagcggatgagatcccgctggcatccggtgttgagaacctgtcatccggaagtatgaagctgcaggctcaggaacagcaggataaagaggaagaagagacttatcaggaagcggaagaagctgaggctgagaaagctacagagatgtctttgtcccagagtgttgcagagatcatgaaggagaagtctgccggaaatgaggaaagtgaggagaagcctgcaggggttccgctcaatgaggaaggcaagcctgatttttccgcaacgatccgtatgccggagctgaagatcccgaagtccatgatcaatgtggacccggagaatgcaagcagttccgcagagatcccggacgcgtccggaattttcggaagtatcgaggatattgcggcatctgtaggtgacaggtccgggaaggataaagataaggacttcaacctggaggatactattctggcagcagctacacagcagggaatcgatatcccggaggaagagaaatctccggatgtccagcagtccgacgtaacggaagagccggcaggtattgaggatctggatattgcggctgatgaatttgttccggaggagccggatgcggcagatatcgaggatatcatggcgcagatctccgctcagcaggaggaagaggtaacggagacttccgataccagacttccggatatcgtatttgatgaagatgaggagccggttactgaggaggatcttcaggctgcagaagcagagtttctgaatggtccgtcaggagtacagaagccggtggaagaagaggatgtgcttccggagattccttcactggaatctgaggagcaggtgcagaaggcggcagcagagccttcagcgaagcttcatcatgaggaaccgctggcttcagcggaagaggaaaatcttcttgatgaggaagaagaatacagtgatgacgcctttgaattccaggaagaggatgaggatgactttatcagcagtctcatcggtgatgattctgatgaagccatggaagaggacgatgaggaagaggagctcagcgaggaaaagcagcttgagaaatttatcgctacgatccatccggaaaaggatcctacaaagatcgtttccagaaagaaagagctcacagatgaagagaaacagcttttcacctattttgttacagttcccggaatgaaggaacagctgcttgatgtactctgcgatgtgcagatgggcgcagcagacaagacctcccagaccggaaatgtgatcgttatgggcggcagagaaacaggtaagacgagactgatctcaagtctgatcccggcaatctgtaaagagctgaatatcgaggcttccaaggttgcctatatatttgcggatgatctcaacggaaaggatattccggagatcgtatccaagcttgccggcggtttccttgttatcgaggatgcaaaccagctttcccaggaaacagcagatgagcttgaggaagctatgaccggaaacacaaagggaatgatcgtggtcctggaggatgaaaagatcggtatgcgtaagctgatcgcaagatatccgaagcttgcgaagaagtttacatccatgatcaacattcctgtatttacaaacgatgaacttgttaatttcgctaaggtctataccatggagaatggattccgtatcgaccagatgggcatgcttgctctgtataatctgatcgggatcaaccagaaggaggatcagccgatgtgcattggtactgtgaagaccatgctggataaggctatggagagagctcagagcggattgttcaagcgttccaagaagcgtgtggaccgtgatggctacacggtactttttgaaaaggatttcagctgaaaataagaaaaagcagaggtaaaaaatatggccagaccttatcttggtaacccgaaatataccattgaagtccttcaaaagtatcattttgttttccagaaaaggtttggtcagaattttctgatcgacgagcatgttctggaaaagatcattgagtcttcgggtatcacgaaggatgattttatactggagatcggtccgggtatcggaactatgacccagtatcttgcggaggctgccagagaggtggctgctgtggagatcgacagttcgttgatcccgatccttaaggatacgttgaaggactgggataatgtttccgtgatcaataacgatatcctgaaaacggatatcaaaaagatcgcagatgagaaaaacggcggcaagcctgtgaaggtggttgcgaatctgccgtattatattacgactccgatcatcatggggctttttgagaagaatgttcctgtggattcgatcactgtcatggtgcagaaggaggttgcagaccgtatgcaggttggtcccggtaccaaggattacggtgcgctttccctggctgtgcagtattatgcgaagccggagatcgttgcgaatgtaccgccgaactgttttatgccgcggccgaaggttggaagtgcggtgatcaagctgacgcgttatgagaagccgccggtggatgtgaaggatgaggggcttatgttccgtctgatccgtgcatcttttaaccagaggagaaagacgcttgtgaacgggatcagaaattccggagatttttccctgagtaaggaggagatcgaggatgtgttcaacaggtgtgatcttccgctgaatatcaggggtgaggcgctgacactggagcagtttgcgatgcttgccaactgtatttatgatgagaaaaattaatatatgataaacgcaaaaagagcccgggcagctgttccgggttctttttgcgtttccggacgggaatgttggagaggtttcctgtccggacctatatatttgttatagaaaggaggttatgtctgaggtgtcagacataagtaagtaatgaaaaatttacattttttattttactgatgagatgttaggaaagtttgtttaaaatatgaaaatattgtgaatatatttttggtgatatacataaagtctgaatggcgtgggtgggaatggggaaaattgaggtttacagaggggtgggggtgtgtggtatactgaggggcgtcgaaaaggtaatgatgaggtaataaaaaggcagtaaaagatagttaaaaatagtaaaaggcaatttttgataagggctggtgcccgtatggaggttgaatattatgagaagattgaacaaggttacagctttggttattgcgggtgttatttcatgtacatctccgatgatggttatggcgtctgattccggttctgttatgagtcaggcggaggagatcctgaaggataatgaggttgggtctcttgcttctgatccggataaggttggggatatcattgtttatgtgaaggggctttttgattctaaccagatcacggatgatgagatttctcagggaatcgatgaggctgcggatcattttggggtgagtcttaatgaggatgataagagttcgctggttaatattatcagtaagttccgtggaatcgagatgagtgatgatcagatcaaggggtatgtgagtgatgcttatagtactttgaaggatatgggtgttacgaagtctgatgtgaagaatatttttgagaaggcggttgagtttattaaggggatgctttcacggcggtgatggtttgtgatggctggtgtttttgatgatgttttagatggagtttgagttagagggtgagggttgtggctcttttgttggggttgttgttggtttgtttggctgagatgtacaatatgtacaatgtttagggttttggttttgtttgtgaatgtggtgtttttataaattgggggagggtgttttgaaaaaaattgtgcaaatgcgctaattgtttacgggatgttcattgtttgttcatatttgtctggtagtatagggatagttcgaaagaacgttacgaaagacgctgtaatggtgtgtatctgtatcattacacatacaatttttttcataataatcgccccggtaagccactaccggggcactcctcgtttttgggcctttttggggctcttttttttatgggtggggagggacggacggactgccggaggggcggctgcatggtcgtgcctggtgcggtcgtttcgccgggtcatactaagcgtctgagtattctgccgtgcagggcgccccataactcgccatgtacgctgatgcgtacctggctcagacagatggggcttactctgcggcttgtggccgcagagtaccttcccgtcagaagcctcaggcgctaagtatgaccagcggcttactccgacgcaccgggtcccgaccatgcagccgtccctccggcagtccgtcctgtgcgttggttgtgggagtgataagtttgtgtggtgattgggtgggtaatttatgttggatgtataaactgtatcctttgttagggatatttgtagtattgaggggagtattttctgctgagggggtgttttgagtgagggatttttttggatgtgtggggattgagtggtctgacgggaggtggtgggccatcagcgctgcgctggatggctgcaagggctgagtttccttgtggtctgacggggggatgtgtggcatcggcgctgcgctggatgcctgtgaggtgtgctggaggtgagtgatgtatgtgtggcatcggcgcgtgctggatgcctgtgaggtctggggcttgtggaaaaaaatatagcgcgggtggggtgtgcatgctataatgattaggattatagtgctgtcgtctggtttggggcggcggtggttgggtttttgtttgaatgggaggtctggatatggcggagtctatgaaggattttgagagggagctggaggcttcttttaagaggatcgatgagggggatattatctccgggactgttgtgagtgtggatgagtcgggggttgttcttgaccttaagttttatgctgagggttttattccggtggaggagttttcccgggtgccggggtttaatattaaagaggctgttcagccgggggatgaggttcaggcgatggttcttcgcagggatgatggtcaggggaatattcttctttccagagcggatgctgcggatgtgcttgcctgggacaggctgaaggagcttcaggattcgggtgaggtgctagatgttgttgtgaagggaatcgttaacgggggtgccattgcttatgttgagggtgtccgtggttttattccggcatccaggcttgctttggagtttgttgaggatactgaggtgtttctgaataagccgatccaggtgcgggtgatcgaggctgataaggcgaagaagaggctggtgctttcggcaagggagattcttcgtgagagggctgaggtggagaaacggaataagatttccaatatccaggttggctttgtgacggagggtacggttgagagtctgcagccgtatggtgcttttgtggagcttgggaacggggtttctgggctggtgcatatttctcagatctgtgagaagaggatccggaagccttctgaggttttgagtgttggggataaggttaaggtgaaggttatcgcgatcaaggatggtaagctgagcctgagtattaaagaggcatcggatctgatggctaaggaggttgaggaggagtcttttgagcttccggagtcgggggaggaggctactacttccctgggtgctttgtttgcaaatattaaattatgattattttggatgaaaaaggatggatgtgtatgaaaaaaccggagagaatatttgtaatcggacataagaatccggatacggattccatctgttcggctattgcttatgcggatattaagaacagaactacgcagaataaaaaatatattccgaagagagcggggcagatcaatgaggagaccaggtatgtgctgaaccgttttggcgtacagccgccggcttatctgggaaatatcggtacgcaggtcaaggatatggatatccggaccagtccgcaggcggataagaatatgtcgctgaagaatacctgggatctgatgcaggagaacgggatcgtttctcttccgatccgtgataaggatgggtgtctggaggggcttgtgacgattggtgatatcgcaaagacctatatggatactacagacagttatcttctttccaatgcgaggacgcagtatcagagaattgccgagactgttggcggtgaagtggtggaaggtaacggacacggatattttgtgaaggggcgtgtgcttgtcggtactgccaacccgaagatgctggagggctacgttgaggaggatgatatgatcatcatgggtgaccgtgaggaggatcatcttcaggcgatcagccagaatgtcagctgtatcatcgtggggctgaatatcgtggtttccgagaaggttataaagcttgctcatgagaagaatatcgtgatcatccggtctccgtatgatacgtttaatattgcgcgtctgatcaaccagagtattccggtcagctttgttatgaagcgggataacatggttacgtttaataccgaggattttacggatgatatccaggatgttatgatcaaaaaccgtcacagggcgtttccggtgatcaatcctcatggtaagtgtatcggtacgatctccagacgtaattttctggatatgcataaaaagaaagtggttcttgtggatcataatgaggtggatcaggctgttgataatatcgagaaggcggagatccttgagatcatcgatcatcataagctgggtaccttgcagactatgacgccggttgcttttcgtaatgagccggtgggatgtacgggcacgatcctttatgagatctacggagagcagagactggagatcccggaaaagatcgcggggcttctctgtgcggctattatttcggatacattgatgttccgttcaccgacctgtacgcagacggataagatcgctgccagtgctcttgcgttgatcgcgggaatcaagatcgaggagtttgcccgggagatgttttctgcgggaagtaatctgaaggataagtctccggaggagattttttatcaggattacaagaagtttatcggtgagggtaatgtttcctttggtgttggtcagatcagttccatggacagcgaggagcttaaggagatcaaagagaagctgatgccgtttatggtgagtgagtgtggtcgtcatgatatcacgagagtttattttatgctgacgaatatcctggaggagtctacagagcttctgttttacggggagggcagccagcagatggcggagatcgcttttgagcggaaaccggatggagataccttcagtctgccgggtgtggtttccagaaagaagcagctgatcccggctatgatggaggctgctcagatgatgaacagcgattatgcataagaggtgacggaaaatggcgaaacagttatggaagccggggaacatgatctatccgctgccggctgtaatggtgagtgttaccgatggtgaggggaacgataatatcataacggttgcgtggacgggtacggtgtgtaccaatccggcgatggcttatatttctgtccgaccttcccgttattcctatgatatgatccggaaaacgggtgaatttgtgatcaatctgacaacggaggagctggcgtttgcaacggatttctgcggggtccgttcgggacgtgatgtggacaagttccggaagctgaattttacgaaagagaaagcgcagtttgtttctgcaccgatgatcggggaagctccggtttcgatcgagtgcagagtgcgtgaggtgaaggagctggggtctcatgacatgtttcttgctgatgtgcttgcggtccatgcggatgaagcttatatggataaaaataacaggttttgtctcaatgatgcaggtcttctggtctattcccatggggagtatctggcgggtggccggaaagtgggaacctttggctatagcgtaaagaagaagcagcagaagaagcagatgcagaagaagttggataagaaatcagacagggaagcagacagggaatcagagttggcagggaagttgaagacgtcggggaagccagggatgtcagggaagttgaagatgtcaggaaagtcagggacgtcaggaaagttgaagatgtcaggaaagccagggatgtcagggaaattaaagacgtcgggaaaggcagggagagagaaacggtaggttctgcggagctgaaacgtttgttgaggtttggcagctgttatgctaatatgaaaggatacagtatgaataatattacactgatagggatgcctggtgcggggaagagcagcatcggtgtcgttcttgcgaaggtacttgggtaccagtttattgactctgatctgctgatccagaaggcggagaagaggactctgagtgagatcattgcggatgagggtacagagggcttcaaagcgatcgagaatcgtgtgaatgcttcgatccaggtggagaatacggtgatcgctaccggtggaagtgtggtttactgcgatgaggctatgcagcatctgaagtctgagggtgttgtggtgtatcttaagatctcgctggagcttctttccaggcgtcttggtaatcttaaggggcgtggtgttgtgctcaaggaggggcagacgctggcgagtctttatgatgagcgtgttcctttgtatgagaaatatgcggacattgtggtggatgaagaggataaggatctggaggggagtctccaggttgtgcttgaggcactgaagaacaggggagataaggcgtaactgttggcttgtggaaacggtttgctggagtgtttcgggtcatgggttgtgacaggttttcgtcataaattgtttacaaatctgaaatatgtgttataatatacaactgacctaaaaaacggtattgcggaacgtttgttcctgcagtaaattcagagaaagtttctgctcatagaggagtaaataatagaggtgtgttatggaacagtatgtgattaaaggcggcaatcctctggttggagaagtggatattgcgggtgcgaagaatgcggcgcttgcgatattgtcagcagccattatgactgatgaaactatattgatcgagaatctgccagatgttagggacatcaatgttctgcttgaggcgatctccgagatcggggctcaggttgagcgtattgataagtctactgtaaagatcaacggttctactatcggcaatctcagcgtggattatgagtttatcaagaagatccgtgcttcttattatcttctgggtgctttgcttggtaagtataagcatgcggaggttccgcttccgggtggatgtaatatcggcagcaggccgatcgaccagcatctgaagggtttccgtgctcttggtgcggatgttgatatctgtcatggtgctattgttgccaaggcggagaatctgcatggcagccatattttcctggatgtggtttctgttggtgctactattaatattatgatggctgcttctatggcgactggccgtacgatcattgagaatgctgcgagggagccgcatgttgttgatgtggcgaatttcctgaacagtatgggggcgaatatcaagggtgccggtacggatgtgatccgtatccgtggtgttgagacgcttcatcgtacggagtattcgatcattccggaccagatcgaggctggtacgtttatgtttgctgctgcggctactcgtggtgatgttactgttcgtaatgttattcctaagcatcttgaggctactactgctaagcttgaggagattgggtgtgaggttgaggagtttgatgatgcggttcgtgtccgtgcgtcgcatgtgcttcatcgtacgcatgtgaagacgttgccttatcctggttatcctacggatatgcagccgcagatcgcggttactttggctttggctgagggtacgagtattgttactgagagtatttttgagaaccggtttaagtatgcggatgagctttcccggatgggtgccaatattaaggtggaggggaactctgctattattgatggtgtgaggaagcttacgggggcgcgtgtgagtgcgccggatcttcgtgcgggggctgcgcttgttattgcgggtctggctgctgagggtgttacggttgttgatgatattgtttatatccagcgtgggtatgagaattttgaggagaagctcaggagtcttggggctgagattgagagggtttccagtgagaaggagattcagaagtttcggttgcgcgttgggtgatggttggtgacaactggtaacgattgatgataattggatatttgagttttgggagagttcctgggtgtttgggcctgggggctctttttttgtgtgggtgggaggaatggggggagggacgaacggacagtctgccagcggggcggctgcatggtcgtgcctggtgcggtcgtttcgccgggtcatactaagcgtctgagtcttctgccgtgcagggcgccccataactcgccatgtacgctgatgcgtacctggctcagacagatggggcttactctgcggcttgtggccgcagagtaccttcccgtcagaagccccaggcgccaagtatgaccagcggcttactccgacgcaccgggtcccgaccatgcagccgtcccgctggcagtctgtccgttctgtttttttgggggtgtgaggggtggtggtttgccggaaggggatgagccatcagcgctgcgctggatggctgcaaaggctgagtttccttgtggtttgccgggaggtggtgtggcatcggcgctgcgctggatgcgttgtggggtgagttgacatcggcgctgtggtggatgctgtgggatgtggtattggtggtgtggggatggcggtttttgtcgaagggtttttgttgacttttgctggtgggatggttatactgaaggtacatatctgggaacattctgggccgttcggctatctgatccccatatggttggttgtataaatatggcggggaggagccggttggttgtgtgaggctttttcttttgccatcatagtgaaaggaggagtcttatgcagaggaagcggcttgaggatatgaatcttctggatgattttttgtttaatgcggtgatgacgtttcctggtattggtgagaggttattaacagttatttataaattatatatgtctttttgactatctttttatatcttcttaaatgtccgcaaagccttattttataggctctacgggcattttgcttttgtggtaaacctcacatatctaggtctatcttcttatattttcgctatcaagcgtggttaaaatcgtggtaaatacttctatgcaattagacgctgaacctctgattttgcggtatctatggacgcatgagcgtaccaattcattgtgatactaatgtttgaatgccccatgatatactgtaaatcttttgggttcatgttcttgcttgccagccttgtgcagaacgtatggcgtagcgtatgcggtgtgatatgtggcaagggattgtccttgtggtgcttgttgtatttctttaccatacggacaaataaagtgctgtaatcaatggcaactttcggcttgcctttatgattgacaaacagaaaattgctccgtccgtctttcacaaatggttctgcctttgagcgtttcttcataacccgttgaaatgcctgtattgtttctctgcttaatggcacttgccttattccgctctttgttttaggcgtttcaatgtaatagccctgttccttgctctttaataactggtggtcgataaccacaacttcattcttgaaatcaatatcggctactgtcaatccacacaattccgagatacgaagtcctgtctttaacagtatcagcacatcatcataatgcttatgatacacattgtccgtcttgataaatgagagtaaggcttgttcctgttcctctgtcaatgcgactttctctttggtatcattttctaggacttcacttaacttgaaatcaaaggggtttttcctcacataatcatcttgaatggctatgtagaatgacgcttttaacgagcgtttatggttgttaatggtgttgtaggaaaagcctttgtctttcatgcgtaacgcccattccttagcgtcagagggttttatcgtatcaatgctcctagcacctaacttgtcctctttcaataaccgcatgagttgttcccgttgtttcattgtgcttttcttcacatttgccctctgtgcgttctgtttggcatagagttggcaaagcgtcattttcttgcctgtgctgtcgataccgtcctcaatatcccgtcttatctgctgttccagttctcgaagtgagggtttttcccgttttccctttggtgtcgggtctgtgggtgtcaatctccaagcatacacatattttgtgtttccaaatgcgtctacatatttatataagtatttcccgtctgttcgttggctctctccagtatgcaggatacgacctttgttatcccgtcttttttctttcatggtgtctgctcctttccttgttggaaagagccttgatatgacttgtgttcatcataacacatacaaggctcatttgcattagattgcgtccaatttgtcaatgacctgttcaaactgtcggcgtttaatctgtatgcggttgccattcataatgagccagccagcgtccttgttttcctctgccaagcgtcttaacttgttttctccgatacggaaatactttgacgcttcttcaatggtaagggtgtatttttcccatacgggaatatcgttgttgttcatcagataccccctttcccatgtttcgtgtcatactggatataggggataaggtcggtgcggtttatcctctgtaaatgggcggttaatttactggaaagggaattgctgtatcttgccttatcaagcatagttcctactttttccagtccacctaatgcgtcatgttcttccaagaaataaaaacttttgacagcggaaatcacgccaccctctgtgagccattgctgtgtttcctcaagggaattatgctgtttgggtacttgcagttttaagacttccacagcccctaaaaagcgttcccaaaaccgacaagttttccacctgctcttactatgacatgtatgcgcagggcggtgttacatatacgccctttatgaacgcctaaaggcgttccctttcttcctgtgtctgatccgttcttaacgctcacgagccttgtaagactcgtggctaaacggaacagccccagtcagaaaccttattttcggtctgatagtccatgcttattcatgctatcaaaatgaaaatacatcttttctatgcttactcaagcgtgtgattgaccctagcgtgcttaatcaccctatctaatacgataataacgccattagaattacttgtcaagaagttttgattgactttttgataaatattaagtatgatatgcttataaacaccgagaaaagcaatgaaaggagcggttatactaagttatggaacattatgaaaagaaaatcagtttcttaggagagaatatacagaccataagaaaacacagaggaatgaaacaacaggaacttgcggataaaatcggtatcaatatgcagagcctttccaagattgaacggggtgtgaattatcctacctttgacacattagaaaagataatggacgtgctgggagtaacgcccaatgaattattatcaggagaatggaagtatattgaccacaccgaaccatatatcatggatattatcaaacgggaacaggacttcaatgtttccttagattatctgtctgaaaatgaatttttcaatgatgaaaaagaatgcagattttacatggaaaccaaactcatacagtatatccataactacattaccaatgaggttacggagttagaagaacttatggaaatcaagcagttgatacaacgtcaaaaaatagaacgcatgatgaaagtacataaggaaatgcgagggttagaccgatacagagaacagcccaaagagtataaataccatgacccttatgatgactggatattccgtcaacttgcggacatagacagcagaaataacattcccgacacttcgccacagttagattttgatgaaacggactatgaagattatctgaaagagaaatggaacagaggtctttaattttcctcttgaatgaaagatacagcaaacaaaaagcccagtaaagagtgcaaagcaccaccaatggtggcaaggctcttgacagggctttttcttttctgtggttggtaatcaagaggaagaaagaaaaagtgtgtatttttcaagacagaaaaatgtcaagggggggggtgctgatttttgttgtggcggatatatggaactgttataatatggatatgtttaaattacgttataagcaagaatattctgctgatttgtcaaaaaacatcattgcaactgccagttgacatatttccatatctaaatggtggctatgcaactgataatattgctaaaattacaccatgaaagaaaggagtgttagctaatgaatatggcagacagaatacaatatttaaggaaatcaaaaggaatatcacaagaggaacttgcggataaagttggagtttcaaggcaggctgtttccaaatgggaaagtgaacaaagtacgcctgacttagaaaaaataattataatgagtgatttttttggagtaacaactgactatatcctaaagggaattgaaccagtagcagacaaagaacaaaaaaataaagagcttacgagtaaggtactttatatatcatcaacagcttttgttgctattgggctgttttgtgcatttggtaattggtatgcagaacaaacaatggaagcagtttggggttcaatgattattcaagctatagggattgttggatattttatagcgagaatactatcggaagaaaaatcccccttttatgtaaattggcttaatataatcggagttgcttttatgcctatttctatgattacaggatatatttcaggattggttttcaaactagaagggtggattgcaccttatccgataggaatatttcatactttagttttcgtgttagtattctttgtagttgtgattgcaagctatattattctaaagaaacaaacaaaatagtgattacctttattttgcaaaagcagttagtcttaggattgactgcttattaataaaagacaccacttcaatgtgtcaatggtgtctttttagtgctattttatcgtcatatcaaggctcgtttaatcgtggtatattcgtggtaaaatgagtgtttttctatacttcgaaaagcttgaaagtgtaatatttatagggataatcaaaaatcagatataaagtttaaatataaattataaaatcatataagtacatgttgagttttataagatattagagtggaatattatggaaaggagctgatgctttgagtaaatattattctatacatgaattttcaaaaattataggcgtatccgcccagacattatgaaattgggatgccaatggaaaacttcatccgcatcatactacagtaagcggctatagatattattctgacgagcaactcaaccaggtaataaatgtaaagcctaaaaatcgcattacaattggatattgtcgcgtttccagccataaacagaaagatgatctggaacgacagattgataatactgaaaaatccgaacagcaggaacttgttgaagatctggttcagataatcacagtattcagttgcaaattacaaggaaaacgagcaaataaagctaagaaacttatccgggaactgatacaggaggaagtagatggtaaaagccataaaagcaatgttgataccaaacaatgtacagaaaactaagatgtttcagtacgcaggtgcttcaagatttgcttataactgggctttggcaagggaaaaagaaaactatgaaaaaggcggaaaattcatttcagatgcagaactcagaaaagaatttacaaagcttagacattctgatgaatacgcatggttattgagtatttcaaataatgtaaccaaacaggcgatcaaagatgcctgcaccgcttataagaactttttcaaaggtttgcagaaattcccaagattcaagccaaaaaagagatcaataccgaagttctatcaggataatattaagatacaattcagcaatactcatgttaagtttgaaggattttcttcgagcaggaaaagaaataaacaaaaactaaattgggtaagacttgcagagcatggtcgtattcctacagatgctaaatacatgaatccgagaatatcttttgatgggttgaactggtggatcagcgtatgtgtggaatttcctgattgcatagaaaaacttaatgatgatggaattggtatagatctaggaatcaaagatctggctatttgctctgatggagctaagtataagaacatcaataaaagtcagaaagtaaagaaactggaaaaacagaaacgcagattacagcgtagtatctgaggagtaatcgtttgattgccggatcgattcaattcaaaaattatttataagcaacgacaaagcaagtattaaaacaaagtagtaaatcttttaccgcccggccctttcgggggccgggagtggtaaatacaacagtatggagaaacctatgagaaagaataagaagaaaaattatattggacttggtttgctgtttctgatagggttgtccatactgctgtatccaatggtcagtgatgcctggaaccggtacagggacagcctgctgatcagtaattatagcagcagtgtttcttcggatgataattcggagaagattgacagtatgtggaaggcagctcaggagtataacgaacagatcaagcaggaaagtgtgccggatgctttttccgtgagggatggacagacggacagtacatatgagtctcttctgaacctgaatggtgatggaatgatggggtatgtggagattcctgtgatcgatgtgagcattccaatctatcattacacgacagatgagtctctggagaagggtgcaggtcatttgttcggcagcagtcttccggttggcggcaagagtacccattgtattttgtcggcacacagaggacttccaagtgcgaaactttttacagatctgaatcttgtggaagagggagatgttttttacctgcatgtgctgggtaagactcttgcctacgaggtggatcagattcttaccgttcttccggagcagacagagtctctgggtatcacggatggggatgattatgtaacgctggttacgtgtacgccttatgcggtgaatacgcacagacttctggtgaggggacacagagttccgatgaaggctgcgaaggcggttcagaaaacagagaagaaggttaccggaatcaccaatccaacgcttccgatgcttgctctctgtgttgtgatcggaattgtgatcgcggtgatcctggttgccggtatcaattctgttcagaacaaaaaacgacgcaggaaatgatttatggctaaaaagaaaaaaaagaaaaagagtaatgttgtcctgaacatttttattgccttggtatttctggcgggggcgggggtgttcctttatcctacgatcagtgatatgtggaaccagtaccgtaacgcccagctggtcagtaagtacgaggaagcggtaacggagctttcggacaatgactatgacaggctgtggaaagaggcgaaggagtataatgccgagcatccggtgaatgccattgtagatgcttttgaggaagaggatacttatgagttgagtcatccctatgacggagtcctggatcctaacggtgacggactgatgggcagtatcgagatcccgaagatcaaagcgaagctggctatctatcacggattgagcaagaccgtgctggaaaagggtgtgggccacgtggagggcaccagtcttcctatcggaggcaagagcacccatgcggttctggcggcgcatcgaggtcttcctaatgcgaagctttttacagatctggatcagatggaaaagggagatatttttatcctgcacattcttggcaagcatctggcctacaaggtggatcagatcaagacggtgcttccggatgagaccagtgacctggatattatcgagggtgaagatcatgtgactctgatcacgtgtaccccttatggagttaacacccacaggcttcttgtccggggagtgcggacgaaatatgtggtggaagatacaaagaatgacgaaacgataccgcagaagcttgctgttgtggatccgaagagggttctggccggcggcgctgcagtgcttgttgttctgattctgctgatttatctgatcgtccgtcatagggacaaaaaacggaaaaagaagcagctttcagaaaggaaagaggaggcagagagcgatgaaaaatagaagaaagcaagggaaaatattccggagccttctggctgttctgatgctgacggctatgctggtcacgagtgttttgcagccggttttcgccggggattatgaagctggaaaaacaggtaatctgacgttgacggttcagcaggcggatgaggagggaaaccagactccgctgccggatgtagggctgacgatctacaaggttggcagtgtgaattttgatggcaatgtgcatttcgtgttggatgaggcactggctgccgcagcaatcgattttgattccatcacgacggctgatggctggtatgaagcggcagagaagctggcggctatgatcgtcagcggaatcgtggatgtgtggggtatgtccaagtcctctgatgcagaggggaatatgactttcgctgatctggctgagggtatgtacctggtggtgcagacagatggaaacagcagtgttatggtttcaccgatgctgatctccgttccttttgcagatcaggagcagggctggatgtacgatgtacaggcttatccgaagtctgtaagtaatccgcagaagcatacacagatccaggttacgaagaggatctataatgttgatgagaacgacaatgtgattcctctggaaacgaaggaggatgtaacttataatgttgggctttaccttgatccggatggagaggcccgttacggagaaatgcagaaaatccatatccagaatgcttccagtggtacagctacatggacggatgttccggatggcacctattatgtatttgagctggatgaggatggaaatcttcttcagcagaatacgaagatcaaggtggatgatgagaatctttactactacaatgtaacgaagccgaatggtgagagtgaagagaagtccaatcaggttgtgatcggtggagatagtggtgttactgaggctgcggcttatgtaaataactattatacaaagatttccgatgtatttagccgtaacggatatatcaacattaagaagaatgtgatgattgatggtgttgcttctactgtggatgatacgttctatgctggtttgttctccactgagagtaacggtgagctgacgcttgagaaggtagtgactctgaaacagaatggtagtgttcaggtaacagtggatcttccaacagatcaggagatcaacagtgttacttatactgttctggagacggataaggatggaaatccggttgatgatgatacctttaagtatacagttaccggtcagggtgaggttacactgaataatgataaccgatatactgtaacaaaggagatcaccaacagtctttcttctgagccgacaccgattccgactgctacacctggtggaaatcatggtggaaatgatcggatcactccgatcccgaataacggcacagcgggcggaactgctccgaacgataccagcggtacagcaagacgttctgtaaagaccggcgatgatacaccgatcggcgtatgggttggaatccttgcagcagcgatcattgttggcggtggtgcagcttatggagttaagagaaagaagaaaaaataaataacggatcattctgaaggatgatcgatggaagaaccgggcgatgtggatgcccggttctttttttggaatatttacgtattggggatgaaaaagcagcgggtgatattttttctcgaaaattgctcttgacattttggtatgataagtatattgtatgtgttgcagtaaatttcataaaagatagccttttattcagagtggtggagatacaaaggatctgtgaagccacggcaaccccggataacccaggaaggtgccaacctgagcgagcaatcgaacaataagaggattgtttacagaatttaaacagtccggattgtacgggctgttttttatgtatataaccgttgttttattacaaaaggagaagatcatggagaaaattttatttacatctgaatctgtaactgagggtcatcctgacaaggtctgcgactctatttccgatgcgatccttgatgctatgatggcacaggatccgatgagccgtgttgcatgtgagactgctactacaacaggtcttgtacttgttatgggcgagatcacaaccaaggctaatgttgatatccagaagatcgttcgcgatactatccgtgagatcggatatgacaatgcggattatggctttgacgcagatacctgtgcggttatcacatcacttgacaagcagtccacagatatcgctatgggtgttgacaaggctcttgagcagaaagaggacgatatgaatgaggacgagctggattccatcggtgccggtgaccagggtcttcagtttggttatgcttccaatgagactgaggagtatatgccatatgccatcaacatggctcacaagcttgctcagcagctgacaaaggttcgtaaggacggcactctgaaatatttaagaccggatggaaagactcaggttactgttgagtatgatgaggccggcaagccgaagagaatcgatgctgttgtatgctctacacagcatgatccggatgttactcaggagcagatccatgaggatattaagaagtatgtttttgatgcgatcattccggctgatatggttgatgcggatacgaagtatttcatcaatccgacaggtcgttttgttatcggcggacctcacggtgacagtggtctgacaggtcgtaagatcatcgttgatacctacggcggaacaggacgtcacggcggcggtgctttctccggtaaggattgcacaaaggttgaccgttctgctgcttatgctgcacgttatgttgcaaagaacattgttgcagccggtcttgctgacaagtgtgagatccagctttcctatgcgatcggtgttgcgcatccgacttctgtcagtgtgaataccttcggaacaggtaagctttctgagactaagcttgttgagatcgttcgtgagaattttgatcttcgtccggctggtatcatcaagatgcttgaccttcgccgtccgatctacaagcagactgctgcttatggtcatttcggccgtacagatgttgatcttccatgggagcatctggacaaggttgagactctgaagaagtatctgtaagagagtcaaaaaaaatatttatatatccttttggcaggaatattgattttaagaaatgcatatgatataatgccattaggcaaaagagatagtaatagttccaaaagaacaaagagtgaagcccccggtagtgccaataccgggggcttcttctaattttttatagtggacaagaaaccactaggttagcgttgtcctacttgttgccgtctagccatttgcaaacgtaataggcagttatgtttgccatgcaggaaacaagaaaagagataataatttccaaaagaactcacctcctcccgttgccgggtatcgggtggacaacaaaaatatgatagcatagtttagaacaaaatggaataatactgatgctggaagatggggttttttatagaaaatttagagatagggaatatagtttatgttataatacgtgtatgtgaatgtgtgaatttataaaggacggagatacagatgaagttaaaaacacgtattattgtgggcttcgttgcgatcatcctgctgccgctgcttcttttttccgcaagtctgtacgggttcagccagacgcaggcgaagcatgtgcaggagagcagcagccaggcttcggattccagccagatggtctatgatatttcgctgccgcagtcttccagcagccaggtgaagctgatggctaaggatatgatcctgaccgcaacgatcatccttgtttttaccgcattgtccgtagggctgtggatctatcggagcattgcggttccgctggtgaagcttaagaaggctaccaagaacatcaaggaggggaatctggattttgtgctggaggttgaggggaatgatgaattttcccagctttgccaggattttgaggagatgcgtaagcgtctgaaggagtccacggaagagaagatcctgatggataaggagaataaggagctgatcagcaatatttcccatgatctgaagacgccgatcactgcggtgaagggttatgtggagggaatcatggatggtgtggcggatacgccggagaagatggaccggtatgtgcgtaccatttataataagaccaatgagatggatcatctgatcaatgagctgaccttttattccaagatcgataccaaccgtattccgtatacgttcagcaagctgaatgtggaggattatttttcggattgtgcggaggagcttgggcttgagatggagaccagggggatcgagcttgtgtatgccaattatgtggagaagggtgtgcaggttattgcggatggtgagcagatccgccgtgtgatccataatatcgtgagtaatgccattaagtatatggagaagccaagggggatcatccagcttcgggtgaaggatgtgggtgattttatccaggtggagatcgaggataacggcaagggtattgccgccaaggatctgccgtatatttttgaccgtttttaccgtaccgatgtttccagaaattcttccaagggaggaagcggtattggactttccatcgtaaagaagatcatggaggatcatggtggaaaggtctgggccacaagccggctggggatcggaacgatcatgtattttgttctcagaaaatatcaggaggtaccgatgaatgagtaggattttgatcatagaggatgaggaagcgatcgcggatctggagaaggattatctggagctttcgggttttgaggtggagatcgagaaccgtggtgatacggggcttgtacgtgccatgaaggaggagtttgatctgatcatcctggatctgatgcttccggaggtggatggttttgatatctgccggcaggtccgtgaggagaagaatacgccgatcattatggtttcggccaagaaggatgatatcgataagatccggggactgggtcttggtgcggatgattatatgaccaagccgttcagcccaagtgagctggttgcacgtgtgaaggcgcatatggagcgttataaccggctggttggttccaatgtgcataagaatgatgtgatcgagatccgtggtattaagatcgataagacggccaggcgtgtgtgggtcaatggtgaggagacgacgtttactaccaaggagtttgatcttttgacttttctggctgagaatccgaacagggtttttacaaaggaagagcttttccgggaaatctgggatatggagtctgtgggtgatatcgctacagttacggtgcatatcaagaagatccgtgaaaagatcgagtttaatacggccaagccgcagtatattgagacgatctggggtgtggggtatcggtttaaggtgtgagcctgtggggaaggcttcggatggagctactgcaggtgtatgagtgcagatcggaatgatggtgtatgatctgtcgggtgcttttgagaggagtggagatatgccgctgttgagggaaagaatttatacgatagaggatatttatgctttgccggagggtgaaagagcggaactgatcgatggacatatttattatatggcgccgccgaatacgatgcatcagaggatttcaagtatcttgtccagaaagataggtaactatatagattctaacaaggggaaatgtgaggtgtttgccgcaccgtttgcggtgtatctggatgagaagacgaatacttatgtggaaccggatgtttctgttatctgtgatccggataagctggatgacaggggatgtaagggggctccggactggatcatcgagatcgtttctccggcgagcaggcgtatggattattataccaagctgtttaaatacaggactgccggtgtgagagagtactggatcgtggatcctgtgaagaagctggtaatggtgtatgattttgaaaatgaggatacggagcagtatacatttcaggattcgatcaaagtggggatctatgaggatctgaggatcgattttgctgagatgtgataaaaatggaggggaatatcgtctggtgatagcccctccttgtttttaggatgaaaaggacgaactatggaagacagattatacaagaaactggaagcgtacggtaagagtgatttttatccgtttcatatgccggggcataagaggaatccgctggctgtggagggggattttccggtggagatggatattacggagattgacgggtttgataacctgcatcatgctgaggatattttgaaaagggcgcaggaggatgttgcacggctttatggtgtgccggagagtttttacagtattaatggaagctccggggcgatcctggcggcggtgtctgcggctgtggataaggggggacagatcctggtggcaaggaactgccataaggcggtttaccatgcgatttatctgcgggagctgagtgtcacgtatatttatccacatgaggatccgaaattggggataaacggagggatttcacctggccgtgtggaaatgtatctggcggaaaatccggagatccaggcggtgctgatcacttcgccgacttatgacgggatcgtgtcggatgtggcgaggatcgcggagatcgcgcatcactatggtgtgccgctgatcgtggatgaggctcacggggcgcattttcggttttcggattattttccggtgtctgcggcgcagcttggtgcggatgtggtgatcaacagtgtgcataagacgctgccctgtctgacccagacgggggtgatccacctgtgcagtgatcgtgtgagccgggaaaaactgaagcgttttctgggaatctatcagagcagcagtccttcttatattcttatgagcagcattgatgcgtgcatggataagctggagcgtgagggggatgagatgttccgtgtgtttacggagaatctggaaaaagcacgcaggcgtctttctgaatgtaagtatatccgactggtgacgccgcaggcctgtgagtgccagagggtttttgattttgacagatccaagatattgatttctactgtgaacagttcgctgaacggccgggagctgcatcagatcctccggagggagtttcatctggaaatggagatggaggcggagaattatgtgctggcgctggcggctgtgggtgatacggcggagggttttgagcggctttgtgatgctattgaagagatcgaccgccgtgaatcgttaaaatacagagaagaggctgtggagaaggagcctttgaaaaacggaaaaatgaagcagatcatgcggatctcccaggctatggatgcggagagtgagcggtgtccgctggatgagtgtatcggacggacgtccggggagtttgcgtatctttatccgccggggatcccgctgatcgttccgggggaacagatttctggacatttcgtaaaaaatgtgagaagatacctggaacagggctttgaggtccagggcctgagcgaccagaccagtgagacggtgtgtgttgtgagaaatgagatgtgaggtgcgtggcagcagacggatctgtgtattacggatcagagcgtgtatagtaacgcatatgcagcagaggagacatatgggaaagattttttacattatgggaaaaagctcttccggcaaggacagtatttacagacaactggagaaggatcaggagctggggcttaagcggcttgtgatctatactacccgtccgatccgggatggagaggagaacggaagagaatatttttttgcagatgagaataaactgaaggagttccgaagaaacgggaagctgatcgaggcgcgtacttatcagacggtttacgggccgtggacatattttactgcggatgatgggcaggtgtctgtgggaaatgacagctatctggggatcggtacactggagtcttttgtgaggctccgggagtattacggcaatgaagtgatgtggcctatttatatagaggtggaagacggagagcgtctggagcgtgcgcttgccagggagaagacccaggaggtgccgaagtatgaggagatgtgcaggcgttttcttgcagaccagaatgatttttccgaggaaaatattcttaaagcaggtatatggaagcgttttgagaatcataatctggatgaatgtgtgaaggagatcgtaaattatataaaatctgtacaataaggaaaaatagttttttttatacagaagattatgttataattagttgaaagatgtccgccgggtataacggagggcacaaaaggcagaaagaggtgattcttatggcaggatttcatgacatcatcggccatgacgatataatcaggcatttgaagaatgcgatagagacagggaaggtatcccactcttatatttttacaggggaaccgggatccggcaagaagcttcttgcagggacttttgcggcagcgctgcagtgtgaatcgggagagtctgaaccgtgtatgacttgtgattcctgtaagaaggtgatcggcaagaatcatccggatatcattacagtaactcacgagaagcctggaagcatcagcattgacgaggtgcgtgaccaggttgtgcgtgatgtggatatcaagccgtactgcagtccgtataagatctatatcattccggatgcggagatgatgacggtgcaggcgcagaatgccattttgaaaactatcgaggaaccgccggaatatgcggtgatcatgctgctgacaagcaatatcgacagtcttcttcctacgatccgttccagatgtgtgcgtctggatctgaaggtggtggatgacagtcttgtgaaggaatatctgatggagcatcttcaggtgccggattatcaggctgagatcgatgcgtcttatgcgcagggcagtatcggcaaggcgaaggaggctgcgacttctcaggagtttgcggatatgactgccaatgccctgaagattttgaaatatgccaattccatggaggtttatgagctgacagaggcgatcaagactttgactgctgataagaataatatcaatgattatctggatattttccagttctggttccgcgatgttctgatgtttaaggcaacaagggaaattgacaacctggtttttaaacaggagattaattttatcagagagcaggccagcgagcgttcttatgagaatatcgaaaaaatccttgaggcactggagaagacgaaggtgcgtctccgtgccaatgttaatctcgaacttgccctggagctcctgttcctgacaattagggagaaatagaatggaaaaggtagttggagtcagatttcgtaacgttggtaagatttattattttaatcctaagaattataatgtgaaggtcggcgatcatgtgatcgtggagactgcccgtggtgtggagtatggccgtgttgtcctggagccgcgcagcgtgaaggaggacgaggtggtccatccgctgaaggaggttctccgtgttgcaacgaaggaggacgaggatcatgaggctgagaaccgccagaaggagaaagaggcttttaagatctgtaagaagaagatccgtgagcatgagcttgatatgaagctgatcgatgcggagtatacttttgataataacaaggtgctgttttattttacagcggatggccgtattgatttccggcagctggttaaggatctggcgtctgtgtttaagaccaggatcgagcttcgtcagatcggtgtccgtgatgagacgaagatccttggcggtattggtatctgtggaaggacgctttgctgtcatacgtatctttcggagtttgcgccggtttccatcaagatggcgaaggagcagaatctttctctgaaccagacgaagatttctggtgtctgtggtcgtctgatgtgctgtctgaagaatgagcaggagacttatgaggagctgaaccggaatcttccgggtatcggtgatatggtaacgacgccgcagggtgtttcgggtacggtccagagtgtgaatgttctccggcagatggttaagatcgtggttgaggtgaatgacgagaaggagatccaggagtttccggtccgtgatctgaggttccgccctaagagaaaaaagggtaagggtggttctgctgaccacgaggagaaagaggttaaaaagggagattcgaagccgaatgagaagtgatctggtttattgcggtgagcgtgtggatgatcttcagaatgggttgtttgtgatccaggatccgaagaagttttgctttgggatggatgcggttctgttgtctggctttgcccgggtgaagaggggtgaggttgcgctggatatggggaccggtacggggatcattccgattttgctttctgatcgtacggatggggagcatttcacggggctggagatccagcatgagtgtgcggagatggctgaccgtagtgtgaggtataatggtcttgaggacagggttcggatcgttgagggtgatatcagggaggctgccgggatttttggggcggcttcttttgatgtggtgacgtgtaatccgccgtatatgatcgggcagcatgggttgacgaatccgcatcttccgaaggcgatcgcgaggcatgagattttgtgttcgtttgatgatgtggcttgtcaggctgcccgggtcctgaaggatcgggggcgtttttttctggtgcacaggccgtttcggctggtggagctgatggcgactttgacgaagtataagctggagcctaagaggatgcagctggtgtatccttttattgataaggagccgaatatggtgttgatcgaggcttgtaagggcgggaattccaggatccgggttgagcggccgctggtggtttatgagcggcctggggtttatacggaggatgttttggagttgtatcggatggtgtgaatgttgtgatgttgtggcttagggtggctgtggtacttcggttggtgaagggacggcgaggggaggcaggctgctggtggtgacacgctgcgccccctgctcggctgcggcgccggtttgctgccattcgcgcaaactcgcttcgctcaaacagtgcgctcggtggcagcagctatcctcacctcgctgacgggggctccgctaacgtcaccaccagcagcctgcctcccctcacctgagattcaaagcgagagatcgcagcgcgtagcgcgctgagtatcgaggaatacaggaaccttgccggaagtgaatcattgagaaagtgaagaaatgaaatggtatcggcatagcgtagtacgctgagtatcgaagaatacagggaccttgccggaagtgaatcactgagaaagtgaagaaatgaaatggtatcggcatagcgtagtgcgctgagtatcgaagaatacagggaccttgccggaagcgaatcactgagaaagtgaagaaatgaaataatatcggcatagcgtagtgcgctgagtatcgaagaatacagggaccttgccagaagtgaatcactgagaaagtgaagaaatgaaataatatcggcatagcgtagtgcgttgaatatcgaagaatacagggaccttgccggaagtgaatcacggagaaagtgaagaaataaaacaatatcggcacagcgtagcgcactgaataccgaagcatacagacacaagtcaacaaataagaacaacgaatcccttgcactacttaaaaaaagcccaaggggtgtgcagagggggcgcggctttgcggcccctttgcggttttcaaagtttccaaacttaaacaaccctccgcggtcaagcggaatcccccacggctaagtgaaatcccccacggccaagtggaaaaaaactccccgcggtcaagcgagaaaagaggcaaatatgaaacaaaacggaaaactatacttatgcgccacccccataggaaacctcgaagacatcacccttcgagtactaagaacccttcgggaagtggacttaatcgctgcggaggatacccgcaacagcataaaacttctgaatcattttgatataaaaacccccatgaccagctatcacgaatacaataagatcgataagggccatgtcctcgtggaaaagctgctggcgggtacaaacattgcgttgatcacagatgcaggtactccgggtatctcagatcccggggaggagcttgccgccatgtgttatgaagccggaattgaagtgacttcacttccgggtcctgctgcctgcatcactgctctgactttgtcaggcctgcataccaggcgttttgctttcgaggcttttcttccggcggataagaaagaacgaaaaacgatcctggaggagctttcctgtgaaaccaggactattatcctgtatgaggcacctcacaggcttgtacggactcttggtgagctcagagaggcgcttggcaaccgccggatgactctttgcagagagctgaccaagaagcatgagacggcattccggactacgatcgatgatctgatggatttttataaagatgagaagccgctgggtgagtgtgttcttgtgatcgagggcaggagccgcagtgagatggaggcggagaagcgtgcttcctgggaggagatttccattgcggagcatgtggcgatgtatgagcagcaggggaattccaggaaggatgccatgaagcttgctgccaaggatcgtggtgtttccaagcgggatatttataaggcgcttttggatggagaaggttctgctgaatgatcaggtgtaattgtggtacggatcgtaggtaacgtgatcgtggatgattgaataagctgcatactgtgaccaaggatttttgggaacgtatgtggctttttttttgtggtaataaaaagtactgtgcggattttgtcgaaatgatttgcttgcagtatagaccatattgtggtaagctgatcttatcaaaaataaaaagcagttccgggattctatggaaatgctgtaaaagcatattttctaaaaataatcttatttttctattacatttcatatatcaggcagattgcctgtcatctcagaaaattcatgcttttttccatttttcagcaggagttttcagatgaggctccttgagatcaaaacagaggagtcgtgtatgatcgtaaacaataacagaacaaacagctctaacctgcggcagtggcatcccgcattttttgctgatatccagatagaactggaggcagaaagggagaatctgatttttgagaatgagcatcagcttgggacgaaaccaatggagatcgatgcgcttgtgatcaaaaagaaatcagatatccccattaataaaaacataggaaggatcttccgaaaatataatatcattgaatataagagtccgacggattatataagcatcaatgatttttataaggtgtgtggatatgcatttttttataaagcggatacggtaactgaggatgaaattccaattgaggagattacgatctctttggtaagcagggcatatccccggaagatgctccgtcatttgagggagttttggaaatgccgggtaaaaaagatggaagaaggaatttattacgtaacagggtctaagatcccaattcaggttattgtaacggaacagttgtcgaagaagaaaaatctgtggctgagaagtctgactgatagaataaaagataaggaagatatgaaacgacttctcaatgaatacagagaaaagcagaaaaatcctttgtacgaatcagtcatgcagatgatcgtaagggctaatgaagaaaaattcagggaggcggattgtatgtgtgaagcattaaatcggatcatacaggatcagatcgaggaaaagataagaaaaagtttacaggctggctatgatgaaggttatggaattggaatgcaggatggaataaaggatgggatgcagcagggaatgcagcggggaatgcaacagggaatgcagcagggagaacatagtattaacagtttgatcctctgccttgctgagctggggaggacgtctgatattataagatcggcagcagatccggaataccagaagaaattgttaaaggaatttgggcttttactggagtagctgaatattccatatgttttaagagcatattgtgctgtgttttgggattgcatttaataagatacttttttgcctgtatttcctatgattttgcgtggaaatacaggcttttttgtgctataataaactctgtattcgtatgtaaaaaatatttattttacaggtataaatgacacttccggagcgggtttgagaattgctttctgcaaaatgaaaatacagtatttcctgaaattaacagatcagtttatcttgttcaggatttgatgtaatgatttctgaagctgctatggttctgcagaaatgaattttcaaacacgtccggacgacaagaacaggaggaatgacatgggcgcagagaatacagaatacggcgcggatcagatccagatcctggaaggactggaagccgtacgtaagaggcctggaatgtatatcggaagtacctccagccgtggacttcatcatctcgtatatgagatcgtggataacgcagtcgatgaagcgctggctggtttttgtacggagatccatgtagatatcaatccggataattccattacagttaccgataatggtcgtggtattccggttggtatcaatcataaggctggtattccggcagttgaggttgtatttaccattcttcacgcaggcggtaagttcggcggtggaggatataaggtttccggtggtcttcacggtgttggtgcatctgttgtaaatgcactttccgaatggctggaggttaccatctaccgagagggtaaggaatacaaacagagatatgagcgtggaaaaactatgtacccgctgaaggtggtaggtgactgtgatccggggctttcaggaacgaaggtttatttccttccggacaaggagatctttgaggagactgtttatgattatgatatcctgaaacagagacttcgtgagatggcgttcctgactaagggtcttcgtatcgttctggaggataagagagagggacaggagcgcgagaaggtattccactatgagggtggtatccgtgagtttgtaagctacctgaatagaagcaaggaggctctttacccggagatcatttactgtgagggtgagaaggacggcgtgtctgtagaggttgcgctgcagcataatgactcctatacagagaacacctatggctttgtaaacaatatcaatacaccggagggcggtacacacattaccggtttccgtaatgcgatcaccaatacatttaatgattatgcacgtaagaacaagcttctcaaggacagtgagccgaacttaagcggtgatgatatccgtgagggcctgactgcgatcgtcagtgttaagatcgagaatccgcagtttgagggtcagaccaagcagaagcttggaaacagtgaggccagaggtgcggtagacagtgttgtaagtaaacagctggagattttcctggagcagaatcctgcagttgccaaggctaccgttgagaaatctgttcttgcacagagagccagagaggcagccagaaaggcacgtgaccttacaagaagaaaatccgcactggacagcatgtcacttcctggaaagcttgcagactgttctgacaagaatccggagaactgtgagatctatatcgtagagggagattccgcgggcggttctgccaagacagcgagaaaccgtgccacacaggcaatccttccgctgcgtggtaagatcctgaatgttgagaaggcacgtctggataagatttacggaaacaaagagatcaaggcaatgatcactgccttcggaaccggaatccatgaggattttgatatttccaagcttcgttatcacaagatcatcattatgaccgatgccgatgttgacggtgcgcatatcgcaacactgcttctgaccttcctgtatcgtttcatgccggagctgatcaagcagggatatgtatacctggcgcagcctcctctctataaagtggagaagaacaaaaaggtatggtatgcatatgacgatgatgagctgaataatatccttaccgagatcggacgtgacggaaacaataagatccagcgttataaaggtctgggtgagatggatgccgagcagctctgggagactactatggaccctgagaagagaatccttctccgtgtgaccatggacgaagctgccacatctgagatcgatctgacatttaccactcttatgggagacaaggtagagccaagacgtgaatttatcgaagaaaatgcaagattcgttaagaatcttgatatctaggagaataaagaagaatggaagataatatttttgacaaagtccacgaagtggatctggaaaaaacgatgaaggaatcttacatcgactatgccatgagtgttatcgcctcacgagccttgcctgatgtaagagacggtctgaagccggtacagcgccgagttctgtactctatgatcgagctgaataatggtcctgacaagccacacagaaaatgtgcgcgtattgtcggtgataccatgggtaaatatcatccgcacggtgacagctccatctatggtgcgctggtcaatatggctcaggaatggtccacaagatatccgctggttgacggacatggaaattttggttctgtggatggtgacggtgcggctgccatgcgatatacagaggcacgtctcagcaagatatccatggagatgcttgctgacatcaacaaggatacggttgattttcagccgaactttgatgaaacagagcgtgagccggttgtgcttccggcacgttttccgaaccttttggtaaacggtactacaggtattgcggtaggtatggcaaccaatattccgccgcataaccttcgtgaaactatcaatgcagttgttaagatcattgacaacattgtagaagaagacagagaaacagctatggaggagcttcttgagatcgtaaagggaccggacttccctacaggagcgaccatcctcggaacgagagggatcgaggaagcttaccgtaccggacgtggcaagatccgtgtccgtgcggtgacaaatatcgagactttgccaaacggtaaatcccgtatcgtggttaccgagctcccgtaccttgtaaacaaggcacgtctgatcgagaagatcgcagagcttgtccgtgacaaaaagatcgacgggatcacagacctgaacgaccattccagccgtgagggtatgcgaatctgtattgatcttcgtaaggatgccaatgccaacgtgatcctgaatctgctctacaagcatacacagctgcaggatacttttggtgtgatcatgctttctcttgttccaaatcatggaagtatggaaccgaaggttctgaacctgaaagagatgctggagtactatctggagcatcaggagaatgtagttcgcagaagaacacagtatgatcttaataaggcacaggagagagcccatattttagaggggcttctgaaggcacttgataatattgacgaagtgatccgcatcatccgcggttcccgcaacgtacagatcgccaagcaggagctgatcgaccgttttgaactgacagatgtgcaggcacaggcgatcgtggatatgcgtctccgtgcattgacaggtctggaaagagagaagctggaggctgagtatgcagagcttatggagaagatccgcaagttccaggcaatccttgctgaccgcaagctccttctccgggtgatccgtgaggagatccttgccattgcagagaaatacggcgatgacagaaagacttccatcggatacgatgtatatgatatctctacagaggatctgatcccgagagaaaatacagtgatcgcaatgacaaagcttggttatatcaagcgtatgaccgttgacaacttccgcagccagaaccgtggtggcagaggaatcaagggtatgcagacgattgaggatgactatatcgaagagcttctgatgacgacaacgcaccattatctcatgttctttactaatacaggacgtgtatacagactgaaggtatatgagatcccggaggccggtcgtacagccagaggaactgcgatcatcaatcttctgcagcttgcaccgggagaaaagatcacagctgtgatcccgcttcgtaaatatgaagagggtcattatctgatgatggccacaaagaaaggccttgtgaagaaaactccgatcaaggattacgagaatgtccgtaagacaggtcttacagcaatcgttcttcgtgatgatgacgagctgatcgaggttaaggctactgataataataaagatattattcttgtgaccagggacggacagtgtatccgctttaaggaaacagatgtccgcagcacaggccgtgcgtccatgggagtaagaggtatgaatcttactgacggtgatgaagttgttgccatgcagctgaacactcagggagattatctgcttgtagtttccgagaacggaatgggcaaacgtacagccatgagtgagttcgttgtccagaaccgtggcggtaagggtgtgaagtgctacaagatcaccgagaagaccggaaatgttgtcggcgccaaggctgtcaacgaagagaacgagatcatgatgatcactacagagggtatcattatccgtctgcagtgtgcggatatctctgttcttggaaggatcacctccggtgtgaagatgatcaatcttacagagggtgtaaccgttgcaagtatcgccaaggtaagagataaagatccggaagcagatacaactaccgaaaaagctgacggagaaaccggcgataacgaagaaggctctgcagaggaagctgtcacaggcagtgaagaggaataaggtcgaggataagtcatgacgacgacaaagaaaaaacgcagaaaaaaatcagtaaagaagctgaaatactctaataaaaaactgaattttgtccacattgcgacactggcggggatcattctgatcctgctggtgatcgttctggcggccaggggctgcggaaagatcagccacagaactccggagggggttgtggaaggctacatcaaagcggcagcagcaggcaagaataaaaagatgcagagctgttacagtgcggataagttatcggatgaggcgaaaacagagatttcctccacgataaaatattttcaggcccatggagtaaaggatgtaaatatcgacagctgtggctccatttctgaaaacaaaaattattcttatgtttatatccgatataatcttgttctagagaacgagcaggaatatccatgtatcagtacctatcttgtaaaggtccaggacaaaaagtattatctgtatgcgccttctgagatttcagataagatcagccagcaggctgccaaggattatcagaaatttatgactacgaaaacctatacagattatacaaaggcttatgaggtttttctgaaaaagaatccgggatacgaggataagatcgcagggaaactgaacggataaagcagaggcgggaggatgtaagaatgaagcggattttgctgatggtgctcagaaatatagtctttgttccttactggtggatcaagctttgctggtatgcagcgcatacagatgattatccggaagagaagaaatacgcattcctgagactggtagatgagcatgccattgaaggcggaaatatccatattgatgtgcatggagctgaaaatatcccaaaagaaaaggggtttatgttttttccgaatcaccagggactgtttgatgtgctggcgatcatccgggcatgcccggttcctttttcggtagttgccaagaaggaagttggagagattccttttctgaagcaggtttttgcctgtatgaaggcttttatcattgacagggaagacctgaagcagtccatgcaggtcattgtcaatgtaatacgggaagtgaaggctggtcgtaattatctgatctttccggagggaaccagaagtaaaaacggaaatcatccggggccgttcaagggcggcagcttcaagactgccaccaagacgaaatgcccgatcgttccggttgcactgatcgattcctttaaggcttttgataccggctctacagagaggatcaccgtacaggtgcatatccttcctccgatgtattatgaggaatacaaagatatgcataccacagagctcgcagaagaagtgaagagacggatcgaaaaggtgatcgaagagaatattatgtaaaaaagaaaagactttgatgaagttggaacaaaaacatcatcaaggtcttttttttgttgtatgttttgtataaaaacgaaacgttttatttgtgaattgttgggcatatacaaccaaaaggtttgatgataacatagagacatccatacaatataaataaaagatgtaaagaggacgaacagatgaaaaaagaagaatacctttctctgatcgatgaggtgatcgcacagggaccgtacacggatacctgggattctctctgtgagcatcctacgccgaagtggtatgcaagagataaattcggaatttttatccactggggtgtttacagtgttccggctttcggaaacgaatggtatcccagaaatatgtatgtgaaaggctctaaggagaacctgcatcatacagagaaatacggaactctggataaattcggctacaaggattttattcctcagtttaaggctgagaagtttgatccgaaggaatgggcggccttatttaaagaggcgggggcgaaattcgtagttccggtagcggagcatcacgatggatttcagatgtatgccagtgacctttgtcgctggaacgctgctgagatgggaccgaaaagagatattctcggagagctgaagatagaggttgagaaagagggaatggttctcggtgcttcttctcacagagcagagcattactggttctttaatggaggtcgtcagatcccggaggctgatgtcaatgatccggaatatgcggatctttatgggccggcagcaggaatcaccagagatatgagtgatatttatgacaatcctccgacagaggagcatatgcaggactggcttgtccgcacctgcgagatcgtggataaatatcagccatccattgtgtattttgactggtggatccagcaatatgcatggaaaccgtatcttcgtaaatttgcagcatattattacaaccgttctgcacagtggggaaaagaaacagccattgatgccaaatttgacgcatatgtttacggcagcgcagtcaatgatctggaaagaggtcagttagaccatatcacaccggatctgtggcagaatgatacgtctgtagctaagaattcctggggctataccattggaaatgattataagaagccttccgatgtagtgctggatctgatcgatgtagtcagcaaaaatggtacacttcttcttaatatcggaccgaagccggatggaacaattccggaagaggatgcacatatcctgagagaaatgggaaaatggctgaaggtaaacggagaggcgatatacggaaccagatactggaagatattcggagagggaccgacggtggttccggagggacatttcacggatacctatgataagcactttacttctgaggatatccgttttacaagtaagagcaatcatatttatgcgactgttctgcactggccggaggatggagagatccatatcaaagctcttggcaatgatatgaagcttttgaaatccacgatccgggatattgagattctcggaacagatctgcatccggcatttgcgagaaataaagaactggatatttcctgcggaagaggggttattgaggcgggagatatgccggtggtattgaagatcacagtagaatagctgttgggggaagcaagtaaattataatgtctttttgaaaggacagaaaggataaggtattttaattatgggagatgtaagattcacaggaaactggaactctgtaaatgcacacacagttccaaaatggtatgaggattgtaaatttggaatttttatccattggggaatttattccgtgccggcatttgcaccgcatacatgggagttgggagaggttgattccaaggaatggtttgcggataatccgtatgcagaatggtattacaattctctgaacattggaaaaggccctacatataagcatcatatagaaaaatacggaaaagatttcaaatacgaagattttattcctatgtggaaagctgaaaactgggatccgaagcagtgggcagagatcttcaaagaagcaggtgcggagtatgttgttctgacaaccaagcatcatgacggattctgcctgttcccaagtaaatatacacatttcaattccgtagaaatgggaccgaagagaaatatcaccggtgagctgacagaagctgtccgtgacgcaggaatccgcatgggcctgtattattccggactgatcgactggcagtatgcaaacgatcctatttttgaggatgatgatctgtttggaacagccagcccgacatttgcatatgcagattattcctataatcagatgaaagagcttgtagatgattatgcaccgagtgtgttctggaatgatatcggatggccgacacagagtgaagagatgatgccgtatttctttgcacattattacaataaggttccggagggtgtggtaaatgaccgtttcaacggacgttatcacgatttccttactaaggaatataaatccggttctgtaaacagaaatgagaaatgggagatgtgccgtggaatgggcttatccttcggttataatgccaacgaaggcgatgacaagctgatttctgttccggatctgatctcacttcttgtcggaacagtggcaaataacggaaatcttctcctgaacatcggcccaaaggcagatggaactatcccggaggagcaggtaagaagactgaagatcctgggtgcatggctgaaggtaaaccatgacggtatttacggaacacgctgcagtgaccgtgaatctgagctgcttgagagtggaatcgagctccattatacacagaaagacggaaatctgaatgtgtttgcagatcatctgaaggaaggtgccaatgaattcctgatcaagggctatcacggagcgctgagaccatttgatccggcagtgaaggtagaaactgaagatactgcagagggacttcttgtgaagattccggaatataaagaagatatgtatgtggttggattaaccaacagattctaaataatgaataggaggaccggatgtatgccggtccttttgttgctgcatgggagaagatcgtggatatccgatcgattctcagggagggagcttttatgtttgggaaaaaaatcgcaatactgttatcaacggcaatgatcctgacagggtcctgtgtatcttctgtggctgtacatgcacagactggttatgcggctgaatatgcacaggaagcatcggcagcaggtgtgcagagcactgcaaagcttgttgcgaagggctcctgtggaagcaaagctgtttaccggttgtactccaatggaaacctgcagatacagggaaaaggggaggttaaggttaccgatgatttttcatacagatcagcaatgataaaaacagtaaccgttgcatctgggatcacgggaatcggtgacagaaccttttcaggctgcagaaatatgaagaggatttcgttgccgggaactctgcggagtattggagtaagagcatttggagatactgcgatcaccaggatcaagcttcctgatggactgaaaagcattggtgcatatgctttttaccagagtaagcttatgagcctggatgtaccgaaaactgtgacaaaaattgatgaatatgctttcagttactgtaacaatctggaatctgtcagcattccgggaagtgtgaaaatattaccggaatcgttatttgagtcggatatgaagctgaaaaaggttacgcttggacagggcgtttccaggatagaaagagcggcctttcggcattgcggtttgacaggagtaagctttccggacagtgttacggttattggtgaagatgcgttttctttttgtccagatctcagaaaggtgtcgttgccgaagaagcttacagagatcgggaacggtgtattcagtaattgtcgaaaactggggaatattacagtacctgccagtgtgaaaaagatcagaagccatgctttttatgattgcctggcaatgaaaaagattacgatcctcaacagtaaaacagtgatagaaaaagaagcgatcggctataatttcaatagtggaaaaaataaaacttttgtcattgccggaaaaaagggttctactgcgcagacttacgcaaagaaaaatgggttccgttttttgaacaatactgccgcagtaaggaccgcaaagatgaccggcgtgcccaaaacaaaaaccatacttcgtggaaaaacatatacgatccaggcagtgaccgtgccgtattacagcgacgaaaagattcttttccgttcctcggatcgcaggatcgctacggtaaattccaaaggtgttgtaaagggaatccgaaaagggacggccgtgatcaccgtgcagagcggagcgaaaaaactgaactgtaagataacggtgaagtaacgatgaagcaggcgtacgtaaaatcgccataacagtgaaagaatacaaaagaaaataaaaacagaagcccggcagatgaagcattgagagttattacatgtgcagctgccgggtttttgcaaatatagagatcccttaaaataaggaaaaaaatagcttgttatacccttaaaataagggtatattaatagaaaagggggaatctaaaatgacaggatatgctgtgaaacattcgatacgggcagaagatatacgaattttaagaaagaaattgaagcttacacaaaaagattttgcaaagttagtaaatgtatctcagaaaacaatagaaagatgggaaagtgaaaatcgggatattacaggaccggttacgacattagttcatattttaaacgagtatcctcagatagaggaaaacctccgcgtgccggaaaaagaatatccgatacgcttatggtacatgtttaagagtgaaatatgtacgattattgatgtggatgagagaggcagaaaagtaaaaatatataattatacaaacaattttattaaaaaagcatttggccgaaatgaaaaaccaacctttgaagaatacgaggaatttctggaatctcgttgtttcccgagacaacgagacaaaataaaattggtattagaagatttgaatctgccattttatgatccgtttatgatcatagaaaagaccgaaggaagaatggcagaggatgatttctggatcaggattgagaggtaaaaatggtacagctttttgaacaggatatcaaaacaaatgacagacaatcgtcaaaaggaaaccaattgaaatggtgcaggaacaatgtatggtataaagctgattatatgggatatgagggattggtggaatatgttgtttcacgtttgttggaaaaatcttcactgaaacaggaagagtatgttttatataaaacagaagagattagttataagagaagaaaatatctgggatgtaaaagtgaaaattttttgcctgagggatggcaacttattacattagaaagacttttttatggattttataatgaaagtctttataaaaaattattcacgattccagaacattcggaaagactggaatttatagtagatcagacggaacgcattacgggaattagcgattttggaaagtatatgagtaagatcctggcaattgatacattttttatgaatgaagatcggcatatgcataatattggagtcttaatggatgcagaagaaaaatatcatttatgtccaatatttgataacggtgcaggactgctatcagatatacagatggattatccgatggaagaaaacataaataatctgatggaggaggcacgatcaaaaactctgtgtgaagattttgatgagcagatcgagattgcagaagaattgtatggtcagcagataaggctgaaatttaatgaaaaagatgtaaaagaaatattggatatggaaagttattatccgcaggaatataaagaaagagtatttgagattattatgagcaggagaagaaagtacagatatttattttgaataactgcacgtcgtatttttggtattttggtaataaagcaggtgcaaaagttatcacatgtgcagctgtcggttttttatagtagaaaaaatgttaaaaaatgtctgtaaacagacaaaatatgacaaaaatattctaaacaaagtttgattaaatgtgatgggaaatttataattttagtataaatgtgaattggaaaatgggggaacggtcacatccaaaggtgttgtaaaaggcatcaaaaaaggaactgcaaccattaccgttcagagtggttccaaaaaactgacctgtaaggtaacggttaaataattcaaaggatattagtaatcagcatttgttatttactcatagttatatcttatatgtttgagtacgcaaaacagactggagcttgataagaatatatatcaggttctcagtctgtttttatatattgcaggcaaaaaaagaacacgttttcacaaaataagattgacttttttcaaaactcttattatcatataaaacatatttaattactatgaaataaggaatgataaaaagttctgttacactgatgatgctgagttacatagatgacgttgagcagcttacaggactggtagcgggtagacttttttcagagggaggggacgggtacatgtccatcaagaagatcgcagaaaaggcaggggtttcaccggcgacggtttccagagttttgaataatcccaattataaatgttctgtttccggactcagggataagatatggaaaacagctatcgagatgaattatgtgcccaacgaggcggcccggaatctgaaaaaaggcgtttccgcaaagcaggagaaaacctggtacatcaatatcctgatgacaagaaccgattcttccacaacggatccgttttttgcggagcttcttcgggtgatcgaaagtgagatccatgataaaaactgcattctttccaaagtatggtatatgtctgtgttttccgatgaccggaagtgccgaagggagaatctggaccggctgatcgacggaatgtatgacgaggtggaagggaaaagggacggactgatcatcatcggcagatgtaataaagaggctttgaagaagttgaataagaagtataagagtgtggtatcggtgaaccggaattctaccaattatgaagtggatgaggtcctttgtgatgggaaaaagatcgcagcagcggcagtggaatatctgatctccctgggtcacaaaaatatcggatatattggccagtgtcacagcgaggaccggtataacgggtatctggaaacactgaagaagcatgatctggatgtgataccggagtatgttatcgaaacaaagcagactgaggccgagggctacgaggccatggaaaagttctttcagtcggacgacatgccaaccggaatctactgtgccaatgatatttcggcgatcggaatgctgaagtgcctgaataaatttcggaaccggtattatatgccttcgatcatatccagcgatgatatacaggaggcacagtttaccagaccgatgctgacaacggtgagcctgcccaaggaggatatgggaaaatttgcattatacctgctgctggaccggctgaagggcgggcattccggtattgtgcgaatggagctggaaggcagactgatgatacggaacagctgcagcagtgtggaggacagtatgtggagcgattattgtatctgaggattgcggatgcgcagatatagtgacagacaggatgcggatgcgctatgaccagagtatttcgtgaaaacgttttcagatattcctatttaattaatgggaataatatggtttaatgtatttaattcaaataaaaaaattacagaaccacagtaaacggaaagaacaggtatgatttgacagcgaaatgaagcagttacattggtgggaaaaagatttccaaataaaaatgtggttgtaaaggagtacacagatcatgaaaagaaaacgcattgcaggtgtctgtatcacactggcagcagtggtactggcaggaacttttgcagtatcgggaaacaatacaaaggataaaaatcatgtggagatcatcaatgtgtcctatgatccgaccagagaattttatgaagcatataataagattttttcaaaatattggaaagaggaaacaggtcagagtgtggatgtgatccagtctcatggcggttccggaaagcaggctcttgagatttccaacggacttcctgcagatgtggcgacacttgcactggaatatgatatcgatgcgatccggaatgccggtctgatcgacaagggctggatcgatgaatatccggatgacagtgctccttatacttccaccattgtatttcttgttcggaagggaaatccgaagaatatccacgactgggatgatctgacaaaggatggtgtgggggtgatcacccccaatccgaaaacctccggtggtgcccgctggaattatatggcagcctgggcttatgccaatgagaaatataacggcaacgagacagagatgaaagcctttatcaagaagctttacaaaaatgtcctggttctggattccggagcaagaggtgccacaacctctttcgtggaaaacgggcagggtgatgtgctgatcgcctgggaaaatgaagcgtttctttctgtaagggacaatccggatgattacgagatcgtaacgccgggcatcagtatcctggcacagccatccgttgctgttgtagatgaaaatgtgaaaaagcatgataatgcagaagctgcgaaagcatatctgaaatatctgtattccgatgaagctcaggagctgatcgcggagaattactataggccggttaataagacgatcctgaaaaagcatgcagatacttttgacctgaaggtgaagctgacaacgatcaaagatttcggcggctgggatgcagttcagaaaaagcatttcgcagacggcggagtgtttgatgagatctatgaagagtagaagagcctgagattttgtaacagaccagagagttgtagaagagtcagagatttgcagcagaccgggaatttgtaacagaccagaaacttagaatagaaaagcggggagacagaaatgaagaaacaacagagtaaacgtgtgataccaggctttggactgacaatgggagtgactttggcgatgctgagtatcgtagttctgatccctcttgcgtctttgacagtatactcggcgcggctgggttttcgggaatttattgaggtgatcacacggccgagggttttgtccggattctatgtaagctttattaccgcatttgcggccacagtgatcaatgctattatgggcctggtccttgcgtgggtgctggtaagatatgattttccgggaaaaaggatcatggatggaatgatcgagctgcctttcgcactgccgactgcggttgccggtatctcactgacatccctgacatccgataaaggtctggtgggaagcttttttgcaaatttcggtattaagatcgcatataccagaatcggtatcacggtggcattgatctttgtgggaatcccttttgtagtcagggccattcagccggttctggagaagctggacggttcttatgaggaggcggctcgtgtcatgggtgcaaagccattcaccgtttttcgcagagttattcttcctgagcttctgccggcaatgctttccggggcgggacttgccttcggacgttgcctgggagaatacggaagcgttgtttttatcgcaggaaacaagccttattatacagagatcacgccgctgatcatcatgtcaaagcttcaggagtttgactatgaaagcgcaacagctatcgcactggttacactggcagtatcattcctgatcctgtttggtgtgaatctggtgcaggcaagaaatacgaaacgtatcagagggagggatgcataatggatgaaaaaaagaagcaggcttccgggccggtgaaatggatccttatcgggatttccgtgatctttctttttgtgatgctggtactgcctctggtggttgttgtaacccaggcgctgagcaagggctggcagtgctacgtgcaggcggtgacagatgagtacacgctgaaagcgctgaagctgaccattggggcgacggctgcggctgttgtatgcaacacgatctttggtctgtgtgcggcatgggcaatgaccagatttcattttcggggaaaaaagctccttaccactttgatcgatgttccggttacagtatcaccggttatcgcaggtcttatctatatcctggtttttggaaagcagagtcctctttattctgttcttgaaagtgcagggatacagatcgtgtttgcagttcctggaattgtcctggcaacgatctttgtcacatttccatttgtgtccagagagatcataccggttctggaatccatagggtccgatgaggaagaggcggcagcactgatgggagcaaaaggctggacgatttttaccaaggtgacatttccgcatatcaagtgggcatttctctatggtgttgtgctgtgtacagccagagccatgggagagtttggagctgtgtccgtactgtccggacatctccgtggaaaaacaaatacacttccgcttcatgtggaaattctttataatgaattccagtatgttccggcatttgcggtttcttcgatcctggtgatcctggcggtgatccttctgatcgcaagaaatgttctggagcataaaggaaagggggaaaaaggcgatgtacgttgagttaaaaaatatcaataaaacatatggggattacaaggcatctgacaacgtaagctttggtatcgaaaagggaaagctgatcggtctcttaggacccagcggaagcggaaaaactacgattctccgtatgatcgccggtctggagcagccggacagcggtgagatcatcatcgacggaagagtggtcaatgatgtgcctgccagcgagcgaggcattggatttgtgttccagaattatgctcttttccggtatatgacggtgtatgataatattgcatttggcctgaaggtacagaaggcggacaagaagtatattaagcagagggttatggaactggtagagctgatcgggctgaagggcctggagaaaagatatccgagtcagctgtccggtggtcagagacagcgagttgcttttgcccgggctctggctccgaatccgcagcttctccttctggatgagccttttgcggcgatcgatgcaaagatccgtacggagcttcgaagctggctgaaggacatgatcgagaagctggggatcaccagtatttttgttacccatgaccaggatgaggctatcgaggtggcggatgaaattattattaccaaccgtggacggatcgagcagaagggaaccccactggaggtttatcagaatccggatactgcgtttacggcgggatttttcgggcagacttctgtgatcgatgattaccaggtgttcaatcacttcgaggaagttccaggaggcgaaaaagccattgtccgtccggagtttgtaaaagtgactaagaagaacgaggaacagaaatataaaagctccgcaacagagggcgtcgtagaacgagtcgcattccgcggtagcagcctggaactgaaagtccgtgtaggaaacaccacactcagcgccagaagaagccttgacgaagaacccgtccgggaaggcgaagttgtggatgtgtttgtgcagaggatttttgtaacaaagggaaatgaggcagtactgctacataatacagctatggttgaggattggttagtgatataaaaaaatgccgcgggagcggcatttttttatgagcaagtagcgttagcggattgcgaatatcatatgatatggccgcggagcggcatttttttatgagcaagtagcgttagcggattgcgaataacatatgatgtggccgcggagtggcatttttttatatatgtgaaattttcacaccgtaatattctgcaagggaatctaccagatcatcacggatttttttgtggtcattgccatccagcgacatgacacaggataccatctgacgttttttatcaacgacgcagtattggccgtaattgccggacaggatcagtgtatcttccataggtcccatatatatgaaatatccataaccatagctctggtaatccggatgctccgtcagtggattgtaagaatcgatatgtttctgacaggcatcaatcacgaatttttttgggacgatctgttttccgttcagggaaccctcatgcagaagcagatgtccaaaacgagccaattcatcaatcgtcagatacagtccgttagctgccatacaatgtccctgagggcagagggtccagtccggattcggaatgccaaccggttcaaagaaacgatatcgcagataattcagcagacccgttccggatttctcttccagaagaacagataaaatataggaacaaaaattgctgtacacaaaatgagtaccgggtgtatatggaaaagaatcattctgaaagaaatatcttacccagtccttttctctgtatcgctctggtccatcgcagaaaaagagcggatctttctgaccggatgacatggtaagaagatcacggatctttatcttgtacagattttcagaagggtcggaagggaaatatttttcaaaccagggataaatgtattcatcaagagtgatcagtccttcacgttctgcgatacctgcggccattgcaacaaaaggcttgctgatagaccatatatttaaacgggttttgaccggaaaaagtctgaattcttcttttagaagatcatttttatatatctgtgcgtagatgatattggaatgatgttgctttgatttctcaagaaaaatatctaaaatttcctgcatgataatccccccctgaaattattattcgtaaaaaagatcaaagtctgaataaagttcttccaggtcatgaagtcgtgtactgatggatttgcgcctggttttgcggatttttgcaacaatactgtcaaacagacaatagaggcatgagaaggagttaaatcccatttcattgagattgatctctgtaatgatagcgtggtctgccagcgcccatgccggtgatgaaatgctgtctgtgatggcgagtatctttgcaccatgatttttggcaatctgtgcatatttcagagaccatttggtatagcgggcaaaagagatcagaagaacaactgtatcctcggatgcttctgtgagatattcgaaattggaatcgtaaaattcgtgaaccaccttggtatttccaagaagctgattcaacagagttcccatccagagagcggcactgtaggaagagcgtgcaccaacaatgaggcgttttttggcattgctcagatgggtaacaatctgatccatatcttcctgattcagatgagatgcccagctttccatggaatggagttcattggcaatgatgttttgataaaaatttccgctatccagcagtgaatcgtcttttgtaaccgtaggaacggaaagaatatcattctgtacagtacgctgcatttcagaaaaactttcaaatcccagggaataggcaaggcgtatgatagtggtttcgcttacggaaatttccttgctgagtttcgcaagggtggaataactgaatgaatcaaggtgttgtaatatatattcggcgactttcttctgaccggcagaaaggaaagatactttttcacggatcaactgttctattttcatgaaaacctcctgtactgtacgattagtataaattatatatgtctttttgactatctttttatatcttcttaaatgtccgcaaagccttattttataggctctacgggcatttttcttttgtggtaaacctcacatatctaggtctatcttcttatattttcgctatcaagcgtggttaaaatcgtggtaaatacttcttatgcgattagacgctgaacctctgattttgcggtatctatggacgcatgagcataccagttcattgtgatactgatatttgaatgccccatgatatactgtaaatctttcgggttcatgttcttgcttgccagccttgtgcagaatgtatggcgtagcgtatgcggtgtgatatgtggcaagggattgtccttgtggtgcttgttgtatttctttatcatacggacaaataaggcgttgtaatcaatcgcaactttgggcttgcctttatgattgacaaataggaaattgctccgtccgtctatcacaaatggttctgcctttgggtgtttcttcataacccgttgaaatgcctgtattgtttctctgcttaatggcacttgccttattccgctctttgtcttaggcgtttcaatataataaccctgttccttgctctttagtaactggtggtcgataaccacaacctcatggataaaatcaacgtccatgattgtcagtccgcacagttccgagatacgaagtcctgtctttaacagtatcagcacatcatcataatacttgtgatacacattgtccgtcttgatgaatgagagtagggcttgttcctgttcctctgtcaatgcgactttctctttggtatcattttctaggacttcacttaacttgaaatcaaaagggtttttccttacacaatcgtcttgtatggcgatatagaatgacgcttttaacgagcgtttatggttgttaatggtgttataggaaaagcctttgtctttcatgcgtaatgcccattccttagcgtcagagggttttatcgtatcaatgctcctagcacctaacttgtcctctttcaataaccgcatgagctgttcccgttgtttctgtgtgcttttcttcacgtttgccctctgtgtgttctgtttagcgtagagttggcaaagcgtcattttcttgcctgtgctgtcgataccgtcctcaatatcccgtcttatctgctgttccagttcacgaagtgagggtttttcccgttttccctttggtgtcgggtctgtgggtgtcaatctccaagcatacacatattttgtgtttccaaatgcgtccacatatttatataagtattttccgtctgttcgttggctctctccagtatgcaggatacgttctttgctatcccgtcttttttctttcatggtgtctgctcctttccttgttggaaagagccttgatatgacttgtgttcatcataacacatacaaggctcatttgcattagattgcgtccaatttgtcaatgaccttttcaaattgtcggcgtttaatctgtatgcggttgccattcataatgagccagccagcgtccttgttttcctctgccaatcgtcttaacttgttttctccgatacggaaatattttgacgcttcttcaatggtaagggtgtacttttcccatacaggaatatcgttgttattcattagataccccctttcccttgttttgtgtcatactggatataggggataaggtcggtgcggtttatcctctgtaagtgggcggttagtttgctggaaagggaattactgtatcttgccttatcaagcatagttcccactttttccagtccacctaatgcgtcatgttcttctaagaagtaaaaacttttgacagcggaaatcacgccaccctctgtgagccattgctgtgtttcttcaagagaattatgtagtttcggtacttgcactttcaagacttccacagcccctaaaaagcgttcccaaaaccgacacgttttccatctgctcttattactttcatttctgtttggcacgacaaagcgtaggttgtttgccaatagcccgaaagccagttccccaagttccagcggtctgtctttgaatgtcatggcaaaagcatgagccttatcatcacgcagttgcatttctgtccgtttccaactgccaacttcatcaagtgtcttattatgttttgaacagacttccttatctttatcataaaagcggtaggacaatcccgatttaccagcaccgatataaacagtctttgcggtgtcgaaatcatcaaacttgctttcgtcaaagtggtagccctcactattagaaataaattcctctttttcgcatttcttctttatctgctctatggtaaagaatggcttttcgttcttatcatcaatggcaatatcaagtcttgtaaaatggaagttatccagtccgtatcttcgctcacaacgtcggaacatatctccaaaggtacaattcctactatcgagaatacggaaaatatcatcacaacctctgccagtcataacaagataacagcctagcccctgtgggttgtcctctgtctttcttgcgtcccccgatacataaatatctccaatctgccagcgtgcttgataagtcttgaattttatcgttgctggataaacattgaaaatgtcagtcggtaaacctaaaatgtgcatgattacatcttcagcggttgcagtatcaaatacaatgctgatgtaatcaatcttaacggataaatttttgtgtgtagttatagtgcattactcctttcgtacttcccgtttttttgcggggtaaaaatcgtgttttgtcctttatttatcacagtttctaggtactatgacatgtatgcgcagggcggtgttacatatacgccctttacgaacgcctaaaggcgttccctttcttcctgtgtctgccccgttcttaacgctcacgagccttgtaaggctcgtggctaaacggaacagccccagtcagaaaccttattttcggtctgatagtccatgcttattcatgctatcaaagtgaaaatatatattttatatgcttactcaagcgtgtgattgaccctagcgtgcttaatcactctgtctaatacgataataactccattagaattacttgtcaagaagtttttgttgacttttagatatagattaagtatgatatgcttataaataccaagaaaagcaacgaaaggagcggttatactaagttatggagcattatgaaaagaaaatcagtttcttaggagaaaacatacagaccataagaaaacacagaggaatgaaacaacaggaacttgcggacaaaatcggtatcaatatgcagagcctttccaagattgaacgtggcgtgaattatcctacctttgatacgttagagaagataatggacgtgctgggtgtaacgcccaatgaattattgtcgggagaatggaagtatattgaccacaccgagccctatatcatggatattatcaaacgggaacaagacttcaatgtttccttagattacctgtctgaaaatgaatttttcgatgatgaaaaagaatgcacattttacaaggcatataaactcatacagtatatccataactacattaccaatgaggttacggagttggaagaacttatggaaatcaagcagttgatacagcgtcaaaaactggaacgcatgataaaagtgcataaggaaatgcgagggttagaccgatacagagaacagcccaaagagtataaataccatgacccttatgatgattggatatttcgtcagcttgcggatatagacaacagaaacaacattcccgacacttctccacaagtagacttcaatgaagcagactatgaagattatctaaaggcgaaatggaacagaggtctttaatttcctcttgcatggaagatacagcaaacaaaaagcccagtaaagagtgcaaagcaccaccaatggtggcaaggctcttgacagggctttttcttttctgttgtggggtaatcaagaggaagaaagaaaaagtgtgcatttttgttccataaatgctaagggtatgctgatttttattgtggcggatatatggaactgttataatatggatatgaagaaagcgacaaatttgaaagtgttaataattttcaaacagcctcattgcatggaaataagaaacagactatccttaaagtaggaggtggcacaaatggcaaatgaagataaaaaagattttaatgctatgttgcatgatagtaaggatatgccaaaatttcaaattatcatagaccagaaaagtattgagaaatatggtggaaacaaaatgtattttgctcccccgattgactatgacaaagtaatgaaaaaagttccgtatggtaaagtgattacggttggaaaaatacgagaacactttgcaaaattgagtggtgcagattttacagagccgattacagcgggtatatttgtttctattgtagcgtgggcgagttatcagcgttccgaagatgaaacaccctattggagaacattaaaagcaaacggagaattaaatgctaaatatccaaatggtattgaagcacagaaagaaaaattagaagcagagggacataccattattcaaaaggggcgtaaaaatatacgatactatgtaaaggactatgaaaattctctttttgatttgaaataggcaaattctatttcacaatttcatatctctatacacaaagcagttagtcttaggattgactgcttttttcatacctaaatttcagattggagtgatgaaatggtgtttgttagagctgttcactaagattatcggtgcataaaattttattgtggtgcagatatgaaaatgatataatgtggatatgaagaaacggacaaactagaatttgtcgagctggttagttcgagataattttgagtttgttaagatgtggtgcacttgatggaatcacaggtacgacatcatattatggaggatgaaatagatgataggtttgattgttgcgaggtcaaagaataatgttataggcaagaatggtaatataccatggaaaataaagggagaacaaaagcaatttagagagttaacaacgggtaatgtggttattatggggcgaaagtcttatgaagaaatcggtcatccgttgcctaatagaatgaatattgttgtttccaccacaacagagtatcaaggagataatttagtttcagttaaatcattagaagatgcattattattggctaaaggacgagatgtatacatatctggtggatatggactatttaaggaagctttgcaaatagtagataaaatgtatatcacagaagtagatttaaatattgaagatggagatacattctttccagaatttgatatcaatgattttgaagttttgataggggaaacacttggtgaggaagtgaaatatacgagaacattttatgtaaggaaaaatgaattgagtagattttggatttagggtgttttcataaatatattgctttttatgcatatataaattgttgtaagacaaatcccagtttgacaatttcatatccatacacacaaagcagttagtcttaggattgactgctttttaaaaagacaccatttaggtgtaatgatgtcttttgggtgttattttataggtcatatcaaggctcattcaatcgtggtaaattcgtggtaaaatgagttttttctatacttcaaaatacttgaaagtatagtgtttatgcggataatcgaaaattagatataaaatttattataataaattataacaggtgtaaagtttgattacaatataatggagtaaaaaattcttcttaatataaaaaagatgtaaataatgcacaaattaaagtgtgtatttttaataatattgtcaatagaaatcttgaaacctagatgctaatatagcattaaataattcacatgacgtcagaaaaagaattaattacactattaatattaaagtcaataaaaaaggggggcttttatgtcgtcaacagtaaaggaaataaaagaaaaaacaggttacctgaaacgaagtgatctttatacaatcggtgtaggacaggcgattggatcgggtgttctgacactgatcggaccggcaattcttttgactggtcagtcagcatggttggcatatgtagctgcatgtatctggggatttatgatgattgcaccaattccatggatcacatctacactgaaacttggaggaggattttattctctggtaggagatatggccggcaaacgagttgccggcatgtatgcagtaggatttttgccacagacgatcaatctggcgacttatggtgtggcaattggtatgtatgcaaattccctgtggccgtggatcaatgcgaaatggtttggaattgcagccctgagtgtgttctttgccatcaatctgtgtggtgtggatgtaatggcgaaggtacagaaaattctggttatcctgctgtttgttgcacttggtctgtttattgttctgggatgcctccagctgaaaaatccggtgtttgagtttacagcaccagactttttctccaatggtccatccggattcttttccgcaatcatgctgtatgtatattcaacaaacggatattcctgcattatgaattatggtaaacaggcaaaagaagcgcataaagatattccaaaggcacttctgtactgtattccgacactgatggttgtatatggcggtgttgcaattgtagcaagtggtgtgcttcctctggatcaggtagccggacagccgcttaccctggttgcaaaaaatattttaaatccggcacttttcacagtatttatgattggtggtccggtacttgcactgtcttcatccattaattcaacaatttccaataactgtattccggttgcacagtcctgtaaagatggatggcttccgaaatcatgggcagctcagaacagaagaggggcttactggaaactgatgacatttacttatcttatgggaatattacctgtgttactggacttttctatcagtgatgttgtaaataatattatgcttctggcatcagcattggcatttctgcagatttatgcgtatttccagcttccgaaaaaacatgcagaagcatgggaaaaatcaccaatgcatatttctaacggaaaatattatttcctctgctgtttgagcctgtttgcatatatctgcatttttatcaattcttgcagaagcctgaaacttccggtagtaatcatcagtctgatagccattgtagtatgcatggcttacggatggtttagaagtgtaagtcctgatgtaaagatggaaacaagtgtgtgggaggattaatgtttatgaataaagaccagaacctgatcaatgaatttgctatcaaaactttaaaagaaaatctcaatgttatgtatgcgcagatatggcgtgaaggacagttaacggcagaatataaaagaatgccggtgaaaacacgccttaacacctggtctgcctgcaagggtgttgtgtcctgtgcggcaggaatcgcacttgatgaagggctgattcgacttgatgagaagattgtggatatttttccagagtatgcaccggagaatccggaaggatatctgggggatgtaacgctggaaaatatgctgacaatgactacaggtttggaaagctctctgtttttctgtgactggccggagcgttacacaactccggactggatccgatatttcttcgagaatgcgaaagtgataaaaaaaccgggaacagaatggctgtacagcaattttaatacttatatgatcagctgcgcgattgaaaaacgtgcgggagttaatcttctggaatatttgagaaatcgcttttttgagccgctgggaattggaaatccagactggactttgtgtccgaaagggcatgtgcatgcggctaatggactttatgtgaatattgatgagtttacccggtatggacagatgattcttcacaagggaaattataatggaaaacagctggtgccagagtcgtacatgaagatggcaacgtccaatctggtggataattcagtggcaggaagtccgggaaatctttattccggttttggatatggatatcagtttgtaatgaatccggaagccggttcctatcgatccgatggaaattatggtcagttctgtctggcgtttcctgacaaggatgcagtagtaactgtaatgtctctggagggggatttccagaaaataggaaatcatctatggactacagtggttcctgaattataagaattctgtcttgcaaatcagacaatgaaaggtgaaaggtagcttaaatctttccgacttgacattgattggaaatcgttttatactaactcatgtaaataacaggggagcttgtgatggcaggctgagaggaagtcttcaacttcgacccttatacctgatttggataatgccaacgtaggaacgtataagatgaatttacgggagatactttggtgtatctccttttttattggatgcggatgtttttatccgattgaatacgtaagatcaggatttacagggaagggatcaagagcgaatgcttttaaccccggtatcgacaattgaatattgggaaatttgagagtgaactgagttcatgaaggggtgcaccaccgcgggtgtatttctttgtgaactcttttttattgatgaatagcttttgaagtttccggaaaggagagatcatgattacagtaaatggtgaaagcagaacattggaaaagccggtgacagtaacagaatatctggaagcatgtaactatgttccggtgcaggttgtagtagagctgaatgaagaaatcattaagagagatacttacgatacaacagtactgaaagatggcgatgttgtggagattctgcagtttatgggcggcggaagctgctgatgtcgctatagagataaaattaggtatatataccacggcagtaactgacagataagttactgaaaaaatgcagatgaagaatgatctggcagaagaaggcgctggttataaatcggtggaaatattttctgcaaacagacataaagaaaggtggacataaaaaatgacaacagcaaacacaaatgaagacaaactgatcctgggaggccatgagtttacttcccgttttatccttggttccggaaaattttccctggagcttgtaaaagcatgtattgaaaaagcaggaactcagatcgtaacacttgccctgcgccgtgcaaatgagggtgggcttgcaaacattctggactatattccgaaggatgttacgcttcttccgaatacgtccggcgccagaaatgcagaagaggcagttcgtatcgcaagactttcccgcgagcttggctgtggagattttgtaaagatcgaagttatccatgattccaaatatcttcttccggataactatgagaccatcaaggcaacagagatccttgcaaaagagggctttgtagttatgccatacatgtatccggatctgaatgcagccagagatctggtgaatgcaggagctgcctgtgtaatgccacttggctctccgatcggttctaacaaaggaatctgtacaaaagaattcatccagatccttatcgacgagatcgaccttccgatcatcgtggacgcaggaatcggccgcccgtcacaggcatgtgaggctatggaaatgggtgctgcagcagttatggcaaatacagctattgcaactgcaggagacgtccgtgttatggcggaagcctttaagaaagctattgaggcaggaagaagtgcatatctttccggtatgggaagaactctggagagaggtgcaagtgcatcctcaccactgaccggatttcttcatgagtaaaattgataaatgaatgattgaacgcagaacactaagcgggggacaggcactgcctgtgtagtgaaacacaggtattgtctggtttcaatcgaaattgagtttacagatatgcagcagtgaggaccagagtattgctgcaattaggtaattgcgaaactcgctaagttccttagcgatctcgaagcaaatcaggaaagaatgcttgcttttcacggattgtggaatgaaaagagaattcttacacattttaggcgcactttaataagccataggctttatggagttggtaagtcctatgcaatgagaggttttaagctgcgaatgtattcatgatgcttaatcttatgtgcaagaacaacagtaataagctgcgtgattccggaaaggatcagatcagcatgtaaagtcttctcgttttgagttcggcgtcctgcaagacaaagattatccttgatgtgattgatgtctctttcaacaactgttcggattttgtaggtgttgtcccattcttcggttccccggattgttccgggataagcgcgaagatccttttccggatagatgtagaccattcgtccacatttagatgaagtacaaggagtttcacaaaaacattggcgatgtgatttctgggttgctttatcgtaaacccatttcattttaggacaaacgaacttaaaagtaggtattccgctgcgtaagtttgatttactgccctctggcttcattaggagcaatggatcatggggacagcaggggattccgtctttattaatggtataatcctgattttcaagtccggatcttgcattcagagggatataggctttggagaaatgtttgttatcaccaaaagtgttaccagtaagaagattcttatagagttctgcggtatcaaaagctgcatcgccaaggaatgttttcggattgatcagaggatgtctggaaaagaagtccttgagtgttggaatcaagagttttgaatcgtggacacatttatcttcgtcaggggaatcggatttcttttccacaacgatgtcaggatgagaggtcataaaatctttgttataaaaagagatatgacgaatgatgccgagaccattggtaacaatgccgaacttgaagacatagcaaaaatgtccattgatatacagctgcttgatttcaggattggcagaagcatgggaaggcatggaagcgtaggcagccttataaggatcgtaggatttatcaaagcgctgtgctttcgcatatgccttaagctgccgaatgatccgattgacatatttaggattattttcggtaacaaatgcttcaattccggaagaatcgaagatggtcatatctgcttttgcggaatcaatggcctgacagatgggctcggtaatatcaacaagttgatcgaatacgagctgcagatcatctaaaaagtcctgtttgaaacgcgtgattttggaagcatccgggactttggtaaaaccgcagaattcacgaagaggttttgagtaagcgagaaaagtcaggagaagctggtctgtaggaattgagaaaatacgttggatgatcaaagcccacaggaaagcttgcaaggggtatttacgggttctgcccgttgatgcataaaaatgatttctaaaagaaatcggaataatttcatcgatgtcgatatgagtttctaatagggaaagaaatgcaggtttgtcgttttcaaatttttcttggcaatctgaaaaaatatctgccagagaaagctgtttatatggtatcataggtatcagaataactcctttcttggatggcggtttatagtttttggacgactctattataccatatccagtgaggagttatttggttttcaggaacaaaaagtgccgtatttatgcggtttatggcgtttcgcaaacgcctaattgctgcaatatatgagaggagcgacataagagtaatggcagaaacagtacaggccagtcagcaggacggccattttaatgaaagtatcgtaaatgaagaaattctggaagatatgaaaaagaaccgtatcgatcacatgaagtaccttccggatatggaacagctggaagaatctgatgtaatggatcaggttatttccgcaatgaacgcatatgattatgataagtacacagaagcggatgtacggagagcgcttgctcatgacaaccgtacaccggaggattttaaagcactgctttcaccggcagcgctgcctcttttggaagaaatcgcacaggctgcacggatcgaaacaaggaaacattttggaaacagtatctgcatgtttacaccgatctacattgcaaactactgtgagaactactgtatttactgtggatttaactgccacaacaagatccgccgcgcacagctgaatgcagatgagatcgagaaagagatggcagctattgcagaaaccggactccaggagatcttgatccttaccggagagagcaaaacgaaatctaatgtggaatatatcggaaaggcttgtgagattgcccggaaatatttcaaggtagtcggtcttgaggtgtatccgatgaattctgatgagtacgcatatcttcacaaatgcggtgcggattatgtgacggttttccaggagacttataattctgataaatacgaaactctgcatctggcaggccacaagaggattttcccatacaggttaaatacacaggagcgtgcgttaaaaggcggcatgcgaggtgttggttttgcggcacttctgggactggatgatttccgcaaggatgcttttgcaacgggatatcatgcatatcttctgcagagaaaatatccacacgcagagatcgctttttcctgcccgagacttcgtccgatcatcaacaacgacaggatcaacccgaaggatgtacacgaaccgcagcttttgcaggtggtctgtgcatatcgtctgtttatgccatttgcaagtattactgtatccaccagagagtgtgagcgtgtccgtgacaatctggtgaatatcgcagcaaccaagatctctgcaggtgtcagcaccggaatcggaagccatgtggatgatattgaggataaaggtgatgatcagtttgagatttccgacggaaggtctgtggacgaagttttcaacgccctgaaagaccacggcctgcagccggtgatgaatgattatatttatctgtgagatgaacgcggcgaaagaggatcacacagactaccgaggataacttctgtggaatatgtggaaaaccatccgcccgaaagagcgatttttcagggtgagtgtggataactgtttcggaagaatgaatgcagaaagatttttgtcaaacagaggacagttctggaagaagttgtcgtcagaacaagagtgatttttcagtccgggtctgataaaatggatataacccggtttatcttaaagagaaaaatgcagatgaggttttgtcagaatgaaagaaaagcagctgcatggagaagaactgaccaaagaagatctcaaacgtgctgtcaaagatgaagcttaccgcaaaaaactcctggaagagctgaattcacaaggttgattgcgttttcacaaaatctttcaacggtgatgaagaatatgcaaaaaagagtgcgaaatctatggataacagctaaaaatcaaacataaaaacctgtaaaatccgccaaaatatccctgatttcgaaaactactgaaaacggtttccaatctaatagttttcatatgtacttactcatgtttataatagccccaacaacaaaacacgaggcaaaacacaggaggtaagtattatgaaaagaagatggaaatcagcagtagcagctcttgcagcaatagcaacaattggaagccttacaggcgtaaccacctatgcggcggacagtgtcagcatcaccaatgtatcttatgatccgaccagagagctttatgagcagtacaacaagagcttccaggaacactggaaggaaaaaacaggccaggatgtggagatcacacagtcccatggtggttccggcaagcaggcacttgaggttgccaacggactggaagcagatgtggtaacactggcactggagtatgatgtggatgcgatccaggatgcaggactcatcgatgatggatgggtggacgaatttccggaggacagcgctccctatacttcgactattgtatttcttgtgagaaaaggaaatcccaagaacatcaaagactgggatgatctggtaaaaaaagacgtaggtgtgatcacaccaaacccgaaaacctccggcggagcaagatggaactatctggcagcctgggcctatgcaaaagataaatataacggagacgaggacaaaattaaagaattcatcggagatctttacaaaaacgtacttgtcctggacaccggagccagaggcgcaacgacctctttcgtggaaaacggacagggtgatgtactgatcgcctgggaaaatgaagcctatctttctgtaaaagattatccggacgactacgagatcgtaacaccaagcatcagcatccttgcacagccatctgtagcagtagtcgataaagtcgtagacaaaagaggcaccagagatgtggcagaggaatatctgaattatctctattccgatgaagcacagcggatcgccggtgacaattattaccgtccgtcaaaccaggatattctgaaggaatactccgatgtgtttgacctggacatcaatcttgtcaccattgatgatttcggcggatggaaaaaggcacaggaaacacatttctcagatggagggatttttgatcagatttacgaaggatagacagcagaagatatagtcggacacaataacgcaaagaagctgcagaacagtgaaaaaacagagtctgcagcttcttttatgtaaatattgtgaatcacaagggatcaggcatggcttccttcggtcagggaacagccgtccatcatacggatcccgtttatgacatccagataagtgtcatacatttccttccattcatcagaggcatcctcggagtactggctgatggtggacagaagatcgtattttttgccgtcgacggtttcgatacggccgagatagccctgccatacactgtccagaggctggtcttcaccatcgtaatatctggcttctagggtcagtacaggaacatcctcattgtaataagtcagcttatatccaccattttcggtttcggttgtttcataacggcagagatatttccagcgctccggagtgaggacctggaagtaatccgtcatggccatatccacacgctctgcgtaaacgaaatctatggatttgatcagctctgtggcttccttttcggcggccttatcataggtgtctgacggagtcaggacaaaaagtccgaatgtataatcgtcagtctggcatacaagagcatctacatttttttcttcttcgttgacttcggttaagtattgatatttcgtggcaggataagattcaaaggtaagatcctttttggtgatgatctcaccctttaccggatagtattctgccagaaaacccttcagggaagaatcctccagagaggaattcggtacttttaaaacaaaggcagtgctttttccgccatttacggaacgctgctcgaaataaccttctttttcgggcatggattctctgatcgtatcatcggcagggaatccaacccgcatatgaagctcgccgcgcttttccgattcagaggaatcttccgtgtttgtatcggaagaggaatttgggtatgaagaatcggaatcctgcgaggaggagtttccattggtatcggaggattcttctgaagaatctccggaggaggaatcagtttcagaatcggaatattcctgaagattgccgtagtcatcaatataatatttatctctggagccaatatatgtggttccggtggcatcttccagccacacactgccgtcctcataataataatgaggctcaaaataaccgtcctgttcggtccagccggcatcgttgccttccatcagttcaccggaatccgggtcaggggcataattaccttccccgatatattcatcttcggaaccattgcggtaccagtaatctccgttttcatcctgccagatgtactgaccgtcatcggttggagggtcagaagcgaggaccgggactgcagatatggaaagagcgatcgcgcctgttaaaagaactaagatttttttatgcataggcacctcctgataaattgcgcagcagttagctgcttactattctttgatcataaatttttacaaataaaaaagatctgtctgttaagtacattgtaacagacagatcccgatatccggaaatgtgaagaaaaagagacatttacggaaagctgcgtacaggtctggaaatatgttatccgatcgtgaaaaggccggcttatcggcaggtaaaaagatatcccttcccataaaccgagacaatgtcatactcatcggtatcttcggcaccgatcttggtccggaggttaaagatatgccgccgtaccgtgctggtatctgttcctgcacagctgccccataccgcttcgtagagctcttttgcagaaaaaatcttctcctggttttctgcaaggagacgcagcagagagaattcggtccgggtaaggcctgtgtcggcattattgagatatgcatggccgtccgaaagatctaaccgcaggctgccgatggtgatctgacgggaggactgaaatttttcttttattttttcttccattcgtttctggcgttccagaagcatctggatcacggccagaaattcatcgaaattataaggtttggtgagataatagtcgcctccctgctgaagtccttctacccgatcccggatatcactttttccggtgagaaaaagaaccggattcatggttttttcgcggaagcggcggcagatatccagaccgtttccgtccggaagcataatgtccaggataagaagatccggcagctgttcttcaagctgatgacaggcttcggcggctgtctgtgcagtgcggacatcgtagccacggcgccgcagcatccggcagttggtattcagcacctgttcttcatcctcgactataaggataagtgatttcttttcattcatttatgattcctcctccggaagtgagaagaacacctgagttccctcgccttctttacttttcagccatattttgccgccatgggcagtgatgatctgatgacagacatagaggcctatgccgtgccgccagtaatccttatcagcggaaacataacccttgagtgcgttttttcgcatttcttctgacatgccggttccggtgtcggagacgcagatggtctgccagcccggttcgccggtaagagaaatggtgatggttccgttttgggtgtgacgctctgcattggagattagattggtgacaacctggatcagccgttccggatcagcagagatttccgggagtccggattgtgtcgtaaggaccagctgattgttctttgagcttggatgactgcagtagtctttttttacagaatacaaaagaccggacagatctgatgagacaagggaaagggcaagccgtccctgctcaatggaaaccgtatccatcagatccagcacgatccggtcgatccgcattaccgactgttcaatggtgcggagattttcctgcataagagagaaatccagaggctcttcctcaaggagctcggaggtgtcccgcgcgtggagggaaatggaactcagaggatttttaatctcatgggcaacggtggtcaggaaggtggacttggcattatcaagggagcgcagtcgcagattctgttcctccagaaggagctgctgctggttatattccttcagatgaaaatagagaacactgccgcagacaatacttacagagacaaacgccagaaggatatctgccagccggtctgcttccgtggcaaaaggagttacagtgtccgggaaatggtatgcaaccagacacagtcccatataaaggagaatctccagcagggaaacgatcagagcgcgtcttttttccagcatcagcacggtaaaaataatagcaaacacaaagaatgccggcatgccgccacgataaccgccgctggtaaaaaacatcaccggaaaaacgatcagaaagatcacgacaatggtgatcaggtagcagcgctgatattttccactgtaataggaataaagaaaaagccctccggagattgcaaccagcgcaaaattgatcagtacatttccccaggaaccggtcccgagactgagaaaggtcatgatcaggctgatcacagtacctcccaaggcgaggatgttgaacagccggacgcggaaatcaagggtgggactgaataaagagtgaaaaatattccggagcttcgggtttatattgatagggatcacctcctgttcttaatgtaggtttgtatgcctgcgggcatctttcttttggtgctgtaattatcgtaactgttataattgtatcatgctgtcgtatagttgtgtacacaaaaaaatacatttaatcccgttttcctattgacatactatgaatagtaggttaatataagtgtcaacaaaagaaagggaagaggctatgaacgaatacggctttaatacagggctgctccacggcaccaacgagaaatatccacagggtgcaacacaggttccaatctatcagagcagcgcattccgacatgacagcgcggaagacctggagaaaatttttgacaataaaaaaatgggcttctcctatacaaggatcaacaatcctacggtagagtcctttgagaagagagtgaccatgctggaggatgggatcggtagtgtggcctgtgcttccggaatggcagcgctgaccaatgcgtttctgaacattcttcaggcgggagacgagatcgtggcagcctgcggactgtacggcggaaccgtggaactgttcgatgatctgaagcctttcgggatttccgtaaaatatgtgaaagagaataagccggaagcttttgaggcagagatcacagagaagacgcgacttgtttttgcggagaccattggcaaccccaagctggatgttaccgatatccaggcagttgcggaagtggcacataagcatgacgtaccgctgatcgtagacaacacggtggcaaccccgtatctgatccagccactgaagcttggagctgacattgtggttcattcctcttccaaatatatcaatggaagcagcgatgccatcagcggtattcttgtctgtggtaagggtctgaaatgggaccctgaccgatatccgggacttgctccataccggaaattcggaccatttgcatacatcgccaagcttagaaacggacttttccggaacactggcgcgtgtcttgctccgcagaatgctttccttaataatctgggactggaaaccctgggacttcgaatgcagagacagtgtgacaatgcactggagcttgcgagatttttacagggcctgggtggtgacattgaagtaaattatccgggactggaagaaagcccttatcacgaaattgcggaaaagcagttcaggaatggctacggagctatcgtaactgtaagaaccggaagcaaggagaaggctttttccattattaattcattgaagatcccgctgatcatctccaatatcggagatacgaagaccctggtgatccatccggaatccaccatcgcggcacacatctccgacgaagagaagctgcagtccggagtattcgaggatctgatccgtatcagtgtgggaattgaagatgttgaagatttaaaagaagatttcaaacaagcgatagaaaataaccgataaaatctaagagctgcaccagcagagaaatggagagttcgttatggcaaaagtagattacgctacattaaaaaaaggtggtttcatgagacagaagcagaaaaataatttttctcttcgtcttgcctgtgtaggcggtacacttaccgcagaaaaccttaagaagatcgcagaggtagctgagaaatacggtgacggatatgtacatcttacttccagacagggagttgagatcccgttcattaaattagatgatattgatgatgtaaaggatgatcttgcaaaaggcggatgcaagcctggtgtctgcggaccgagagtccgtacagttacagcctgccagggcaacgctgtctgtccaagcggaaatatcaacagctatgacattgcagtgaaattaaatgaaagatatttcggaagagagcttcctcataaattcaaattcggtgttaccggatgccagaacaactgtctgaaggcagaggagaatgatgtagggatcaagggagcggctgaggtcagctggaaagaggatgcatgtatccactgtggtgtctgtgaaaaggcctgcagagaaaacgccatctcctttgaggatgacaagctggtgatcgatacagagaaatgtaactactgcggcagatgtgcaaaatcctgtccggtggatgcatgggatgtaaacgaagcatatatcgtttcctttggcggaacgtttggaaatcacatcagcaagggacaggaatttcttccgctgatcacctctgaggagcagcttttcagagtgaccgatgcagcgatccagttctttgatgatcatgcaaatccgggagagcgttttaaatttaccatcgaccgggtaggcgctgaaaaacttcaggaagttttgaaaggagcatacaatgactgatattaagattgatgataccgtagatattaccgatgtggtctgcccggtaacctttgtaaaagcaaaggtagcacttgaggagctggatgacggacagatcctggcgatcaaaatgaacgatggcgagccggtacagaatgtgccgagaagcgtgaaggaagaaggacatcagatcctgaagctcgaagacaacgaagacggaacttatacactgatcgtaagaaaagttgaagaataggagaacagagaaatgacaatcacagttgcaggaaataaaaaagagtacgaagacggactgaagcttacagagcttattgagaaagaggatattgaaagtcctgagtatgtaaccgtaactatcaacgatgaattcatcagcaaggcagacgttccggaaacagaggtaaaggacggcgacgttgttgagttcctgtactacatgggaggaggcgcaagataatggcttttacaaatgagcagcttgagcggtactcccgccatatcatcctgaaagaggttggagtaaaaggtcagaaaaagcttctgaatgccaaggttctgatcatcggagccggcggacttggagcaccggcagccctttaccttgcagcagcaggtgtgggaaccatcgggatcgcggatgcagatgaggtagatctttccaatcttcagcgacaggtcatccacacaactgcagatgtcggcaaactgaaggtagagtctgcggctgagaccatgaaagcaatcaacccggacgttactgtaaatacatatcatacctttgtagattccagcaacatcatggatctgatcaaagattacgatttcattcttgacggaacagacaactttcctgcaaaattcctgatcaacgatgcctgtgtaatggccgagaaaccgttttcacatgcagggatcatccgtttccagggacagctgatgacttacgttccgggacagggcccatgctacagatgtgcgttccagagcccgccgccaaaggatgccgtaccgacctgtaagcaggctggcgtgatcggagccatgggcggcgtgatcggaagccttcaggcaatggaagcgatcaagtacatcatcggacagggtgatcttcttataggaagacttcttacctacgatgcgctgaagatgacattccgtaccgtgaagcttccgaagaatcatcattgcccggtatgcggcgatgatccgacgatcacagaactgatcgattatgagcaggctgtgtgtgaattaaaacactaaaaattaagtactaagacttcccacaccaataaagtgtgttgaaccttgaaaattcaatatttcagccaataaaaaggcataaatacgttccatttgctataatgaaattgccaaaaaccattttcgcaaaggagatttatgccatgtccattatagcacagaacaacactaacgagatagctctacttgactgtatccagagatttttttcaaaacaccatattggaaaactactggctaaatgcaatggcacgaaagaaaaaggtgtccctgccatttctcttttgaggtataagcttggaaatattttcgtagggcgaagtatgtatatgcagcaacgcagtggatccttcaaggaaggattctctaaaaataccttttaccgtttcctgaattccacaaagacaaactggcttcgtttcacttctcttcttgcggcagatattgtcaacaatgatctgaagaatcttacagatcaaaagcgcaccaatgtctttattgtagatgacagccttttcaaccgatccagctgtaaaaagacagaattgggatcccgtgtttttgatcatacagatatgacctataaaaagggataccgtatgcttacactcagttggagtgacgggaataccctgatcccggttaacagctgtctggtcgcatcttcaaaagagtccaatgtcatcgggcctgttcatacatttgataagcggaccattgccggaaagcgcagaaagctggctcagaccaaagcacctgaagtaatgctcacgcttcttgatactgctacatcttccggattatcagcggactatgtcctgttcgactgctggtttgccaatccggcacagatcacagccattaaatccagaaacatggatgtcattgccatgatcaagaaaagcagccggatcaagtacggatacaagggtgaacagcttaacatcaaggaaatctattccagaaacaagaagcgccgcggcagatcgaaatacctgctttccgttgatatcatgctcgggaaagagaaccctttcccggcaaaaatcgtatgtgtgcgaaacaaggcgaatcgcaaagactggcttgcgttcctctgcacagatccggatctttctgaagaagagatcatccgtatttatggcaagcgctggcagattgaagtattcttcaaaacctgcaaatccatgctgaatctgatcggggaatgccacagcctttcctatgatgcactgactgctcataccgcaattgtttttaccagatatatgttacttgctctggagcaacgtcaaaacgaagaccagagaacgcttggagaactgttcttcttcctggtggatgaaatggcggatattagcttttcaagatctctttgcattctgatggatgctttcatggcaagtcttcaggagatattaaagctcagcgagaatcagctggcagcatttactgctgattttgaagctcgtctgcccgaatatctgaggagcgtgctccatcctgtggctatagtagcataaatcgctattttgttagctgaaatattgaattttcaaggtgcgaagcctatttaaggtatgggaagtcttagttaagtatagaaacccattggaggctgcgaagaaatgctgaaattaaaaaaagaagattacgagaaaatattagaccactgcagaaaaggacttcccaatgagtcctgcggccttctgggcgggaccattgaggacgatataaaaaccatcgagaaggtgtatctgctgacaaatatcgatgaaagcaacgaacacttttccatggacccgaaggaacagctgagcgcgatcaaagatatccgtcagaacggatatcagatgatcggaaactttcattctcatccggagtctccgtcaaggccttccgaagaagataaacgacttgcatttgacccgaacatcgaatatctgatcctctcccttatggatgcagaaaatccggtgttgaaggcctttggtgtagataaagagaaaaatgtaactgtacatgagcttcagataacagagtgatgagtatgaaaaacagattaaacacaaaggaaattacaacagatgtgctgatcataggcggaggtaccgcaggctgctatgcggcgctggttctctcagaacagaaagccggcagggtactgatcgcagaaaaagcaaatatcagacgaagcggctgtctggcagcaggtgttaatgcaatcaatgcctacattgtaaaaggccgcaagccgcaggattatgtagattatgcaacaaaggatgccgccgggatcgtaaggcaggaccttcttcttacagcagcggagaatttcaacgaagttactgcaaagatggaaaagcttgggcttgtgatcctgaaggatgaaaatggtgattatgtagccagaggaaaccgtaacatcaagatcaacggtgaaaattttaaaccacttcttgctgatgcagttcataaagctgagaacgtagacgttctgaattatgtaaatatcacagaccttcttgtaaaagacggacaggtttacggagcggttggtttctctattatggaagaaaccgcatacattatccgggcaaaggcagttcttgctgcaacaggcggagcggccggactttataagccgaacaatccgggattttccagacataagatgtggtatccgccgtttaacacaggtgccggatatgcaatgggaatcctggcaggtgcggagatgacgtcctttgagatgcgttttatcgcacttcgctgcaaggataccattgctcctacgggaaccatcgcacagggtgtcggcgcaaaacagatcaatgcagctggcgagatctatgagacaaaatacggactgaccacaagcgagagagtttacggaacagttcgggaaaatcagcttggccacggcccgtgttacctgaagactacagggatcacgaaggaacaggatgaagatcttctgaaggcttatctcaacatggcaccgagccagactctgaaatggatcgaaagcggaaagagccctagcgagcaggatgtggagatccagggaacagagccgtatatcgtaggcggtcatacagccagcggctactgggtaaatacaggccgtgagactacggtgaaaggtctttatgcagctggtgatgttgcaggcggatgtccgcagaaatatgtaacaggagctcttgcagaaggaaagcttgcagcattggatatggtgaaacagtttaaggccggaactctgaaggaagcagatattcagactgagacagagattaaggttcaggaaggggaaattctttcccagtacgaaaagttccgaaatgaagacgcaccggcattttccgtggaagagctggaagaggctatgcagaaagtcatggatgaatatgcgggaggaattgcttccaattatcagtttaatgagaagcagcttgctcttgcagatgaaaaaatccttcagcttcaggctcttgctgaaaaaacagcggcagcagatatgcatgagctgatgtttgcatacgaacttcgtgagcgtctcattgtgtgccgttcactgatcgctcatctgaaaaaccgcaaagagaccagatggcattcttttaacgaaaatctggatcatccggaaacagatgagaaattttataaatatgtaaattcgaaactggaaaacggcgagatcaggatgatttttcgcgacattgtaaaggaggacacatatgagcatacgaattgatcagaaaaaatgtgttggctgcagaaaatgcagtgaagtatgtccgggaaccctgatcgtcatggaagacaaaaaagccgtgatgaaatatccgaaaaactgctggggctgcgtttcctgtgtaaaggaatgtaaagccggtgccatcgactttttccttggtgcggatatcggcgggaacggaagtatcatgaatgtaaaaagcgaaggggatatccttcattggatcattacaaaaatggacggttctacatccgtgatcgatgtggatcgacggaattcgaataaatattagaccagaagataagtgctgccggttctggcggccggaacaggaggatgagatcagatatgagtggattatcacatttggatgagctggaagcagaggcaatttatatcatccgtgaagttgcagcagagtgcgagaagccggtaatgctttattctataggaaaagacagttctgtaatgcttcatcttgcaatgaaggctttttatccggagaaaccgccatttccgtttcttcacgtaaatacaacatggaaatttaaagagatgatagagtttcgtgacaaaaccgcgaaggatctgggaatcgaaatgcttgagtacattaatcaggatggtgtgaagcagggtatcaatccttttgacagcggctccgcatatacagatatcatgaaaacgcaagcactgaagcaggctcttaagaaatatggtttcacagctgcttttggcggcggtcgtcgtgacgaggagaaaagccgtgcaaaagagcgtatcttctccttccgtaatgcagagcaggcctgggatccgaagaaccagcgtccggagatgtggaagctttataatacggagatcaataaaggcgaaagcatccgtgttttcccgatttccaactggactgagacggatatctggcagtatattaagagagaaaatatcccgatcgttcctctttattttgcaaaagagcgtccggttgtatacagagatggcaacattatcatggtggatgacgacagaatgcgcctgaacccgggggaggagccgcagatgaaaaaggtccgtttccgtactctcggatgctatcctctgacaggtggtatcgagtctgacgcggagacactggacgagatcattgacgagaccttaagctctgtggaatctgagagaaccacacgtgttattgattccgacggcggagctgcaagtatggaaaaaagaaagagagaggggtacttctaggatgagcggattactgaaatttatcacttgcggaagtgtagatgatggaaaatctacactgatcggtcatattctttatgattccaagcttttatatgcggaccaggaaaaagcccttcttctggacagcaaggtaggttccagaggtggtgccattgattattctcttcttctggatggcctgatggcagaacgtgagcagggaatcaccattgatgttgcgtatcgttattttacaaccgataaaagaagctttatcgttgcggatactcccggacatgaggagtatacaaggaacatggcggttggagcttcctttgctcagctttccattattcttgtggatgcgaagcagggggttctggtccagacaaggcgtcatgcacgtatctgcgctctgatgggtatccatcattttgtatttgctgttaacaaaatggatcttgttgattacagtgagagtcgttttaatgagatcgtaaaggatatcaatgagctttctgagactttggggcttcaggatgttgtgatcattcctgtcagtgctacagagggtgataacgtaacgaagaagtctccgaatatgccttggtatacggggaaagctcttctggagcatcttgagactgtggatgtttcagaggctgagaatgtcagcgagttttatctgcctgttcagcgtgtttctcgtccaaatcatgaatttcgcggtttccagggccagatcgagagtggtcgggttcatgtaggcgatatcatcacaacgctcccaagcaacgagacagcggctgttaagacgatcctggtgggcagtgacgatcgtgaagaggctgttgccggccaggctgttacgatacagttggataaagaggtggacgtaagccgtggatgtgttcttaccaataataatgagatccctgttgcaaagggctttgaggctacgcttctatggatggatgattccaggcttgaagtgggcaaggagtatcttgtgaagcttggtaccaagaagatcgcaggtgtggttaagagtattgagtttaagacggatgtaaataccggggagcatctgcatgcggatacaatcgagaagaatgagatcgctctttgtaaaatcggtctttctgataaggttgtgctggatgagtttaagaggaataagactcttggtgagctgatcctgatcgaccgtgtgagtcatatgacttctgcatgtggtgttgtggaatcggttgatactgagggggagaagccttatttccagaaggatgatgtgaaggttggcggttatgtttttgaggagttttattttaaccttgagaatgcgctgctttccaaggcggataaagaggttaagacttatcatgtaggggatgtggtgcctgttgagggtgacagctttgagtatccgggctattttgatattgtttctctggaggatagcgcggctgttctgattcgtgataagagggtgcaggatattattccgctggaggagtatgtgtttatggggcttcctgttgtggatgagagaggttttgccctggagattcgcagtaatgatgattatcagatgtttttgagggaatttgaggctgctgataataagtcggagtttcataataagtggtttaagtttgagacttacaggaggattgtctgcacggataatttctggatgatctgatgttgggttacttatagtttctatagttatgtgtgtaagaggctgcatgtgcggcctcttttctttgggtgttgcgggatttcgtggtttgacggacgccgaggagctggcatatgggcgggacaggcttcgtcggtggaaactactaagactctgaaaggtggctaaaagcgttttccaaaagtccgaactcgctgcgctcagacagcgaacttttgaaaaacaacgccaccttccagagcctaagtagttgtcacacctcctgcagagcgccccgcccatatgccagctcctcggctgtgcacacaggccggttgctgaaagtgaacagttcgagatagtattcaatgatgcatggcagtagagtgtcatacagaaattgttcaggaggaatgttgtatctaagaatcagctcggcacaacgttccggaataatatcggctcagacagtaatcagcttggcataagattccataataaaagtcagtcgcattatatatcgaagatgtagcgcttgttccgtgcccaagagggtggggggcagggaagccctcggacttcggaactctgagatggacttcccctgcgctgtccacacggacagcgtgtcgtgcgtagccacctgtctaaggggataatatgattggtcaatcgcgctaagataaaattaatgtaaaaaaatgaaaaaaaggtgttgacaaaacttatatctttcggatataattaaccatgcgtttcggatgaaaacacagaagaaatgcactccaatttaataagaaattataagttcggagtctggagaagtactcaagaggccgaagaggtgcccctgctaagggtataggtcgctaacgcggcgcgagggttcaaatccctccttctccgttatttttttgaaaaaataaatttttcaaaaaaatgaaaaaacttgttgacaaacgcttgcggatgtgataaagtaaacaagctgtcagcgagacagagattcatcaaaaaagagtttgaaaaaagtacttgacaaacgatttgagatgagataaaataaacgagctgtctgagagacagacgcaacaaaccttgataactaaacagtgaaacacatacgattctcgaaaatttctttacatttaaagaacggtttaaacaaaccaaaagcagtaaaaacgagagatagccaaacggttgtcttgagtaaacgaatcaaacattttatcagagagtttgatcctggctcaggatgaacgctggcggcgtgcttaacacatgcaagtcgaacgggaaaccttttattgaagcttcggcagatttagctggtttctagtggcggacgggtgagtaacgcgtgggtaacctgccttatacagggggataacagtcagaaatgactgctaataccgcataagcgcacaggaccgcatggtccggtgtgaaaaactccggtggtataagatggacccgcgttggattagctagttggtgaggtaacggcccaccaaggcgacgatccatagccggcctgagagggtgaacggccacattgggactgagacacggcccagactcctacgggaggcagcagtggggaatattgcacaatgggggaaaccctgatgcagcgacgccgcgtgaaggaagaagtatctcggtatgtaaacttctatcagcagggaagaaaatgacggtacctgactaagaagccccggctaactacgtgccagcagccgcggtaatacgtagggggcaagcgttatccggatttactgggtgtaaagggagcgtagacggatggacaagtctgatgtgaaaggctggggctcaaccccgggactgcattggaaactgcccgtcttgagtgccggagaggtaagcggaattcctagtgtagcggtgaaatgcgtagatattaggaggaacaccagtggcgaaggcggcttactggacggtaactgacgttgaggctcgaaagcgtggggagcaaacaggattagataccctggtagtccacgcggtaaacgatgaatgctaggtgtcggggagcaaagctcttcggtgccgccgcaaacgcattaagcattccacctggggagtacgttcgcaagaatgaaactcaaaggaattgacggggacccgcacaagcggtggagcatgtggtttaattcgaagcaacgcgaagaaccttaccaagtcttgacatccctctgaccgactcttaaccgagtctttccttcgggacagaggagacaggtggtgcatggttgtcgtcagctcgtgtcgtgagatgttgggttaagtcccgcaacgagcgcaacccctatccccagtagccagcggttcggccgggcactctgaggagactgccagggataacctggaggaaggcggggatgacgtcaaatcatcatgccccttatgatttgggctacacacgtgctacaatggcgtaaacaaagggaagcgaacctgcgagggtgggcaaatcccaaaaataacgtcccagttcggactgtagtctgcaacccgactacacgaagctggaatcgctagtaatcgcggatcagaatgccgcggtgaatacgttcccgggtcttgtacacaccgcccgtcacaccatgggagtcagtaacgcccgaagtcagtgacctaaccgcaaggaaggagctgccgaaggcgggaccgatgactggggtgaagtcgtaacaaggtagccgtatcggaaggtgcggctggatcacctcctttctaaggaaaaagtagagaaacaagatgtgttttactgttgagttatcaaggcaactgaataatgatatttctggtagcgatgcgcttaggggacacacccgttcccatcccgaacacgacggttaagacctaagcggccgatggtactgcactggagacggtgtgggagagcaggtggctgccagatcaaatggggatgtagctcagttgggagagcacctgccttgcaagcagggggtcgagagttcgaatctcttcatctccactgaaatcgaaagatttcaagatgggcttatagctcagctggttagagcgcacgcctgataagcgtgaggtcggtggttcgagtccacttaagcccactggtttaaatgaaccagaaccccgaaaagttcataatcatgagcaatagggcaaaggtccacttaagcccattgggttttaagtaataaagcccaatacattgtaccttgaaaactgcatacatgaaatttgattaagttaatcaaatatccttaaacgcaaagtattaagaaattaatgcaaacgcaaagataggaagacatcgatttatctgttattgaacagagtaatcaaacacatgtcggaagatacgagagtatcggaagacacgagaatcaagagaccgcatcacctacgctagggtgatgaagcgaaaggtcaagcaataagggcacagggcggatgccttggcactaagagccgatgaaagacgtgataagctgcgaaaagcttcggggaggagcaaatatcccgtgatccggagatgtctgaatggggaaacccgcatgagcagacctcatgcatccatacgccaatccataacgtatggaagggaacccggggaactgaaacatctaagtacccggaggaaaagaaagaaacatcgattccgtaagtagcggcgagcgaacgcggaggagcctaaaccggtgtgcgtgcatgccggggtcatggactgcatttaagattcagcgaagttaacagaacggttttgggaaagccggccggagagggtgaaagccccgtacgtgaaagcagagctgactgagcaggatccggagtaccacgagacacgaggaaccttgtgggaagtaagggggaccaccccctaaggctaaatactacttagtgaccgatagcgcatagtactgtgaaggaaaggtgaaaaggaccccgggaggggagtgaaagagaacctgaaaccctgtgtctacaagctgtggaagtactttatatgtacgaccgcgtactttttgtagaacggtccggcgagttacgcttactggcaaggttaagcacttcaggtgtggagccgtagggaaaccaagtcttaatagggccagagtcagtaggagtagacccgaaaccgggtgatctatccatgtccaggttgaagctgccgtaagaggtagtggaggaccgaacccacatccgttgaaaagggtggggatgaggtgtggataggggagaaattccaatcgaacccggagatagctggttctcctcgaaatagctttagggctagcctcggtgtgagtcttgcggaggtagagcactgaatttcctagggggcgtcaaagcctaccgaagaatatcaaactccgaatgccgtgtagatatcaccgggagtcagactgcacgagataagttgggcggtcaaaagggaaagagcccagacctacagttaaggtcccaaagtgcgcgttaagtggaaaaggatgtgggatttcgaagacaaccaggatgttggctcagaagcagccatacattcaaagagtgcgtaatagctcactggtcgagaggtcctgcgccgaaaatgtccggggctgaaacgcgccaccgaaactaaggaatctgaaaagattggtagaggagcattgcatgcgggaagaagcagtaccgtaaggagctgtggactgcatggaagagagaatgccggaatgagtagcgagatagaggtgggaatcctctaggccgaatatccaaggtttccagggtaaagctgatctgccctgggtgagtcgggacctaaggtgagggcgagagccgtagccgatggacaacaggttgatattcctgtactgcagtatgacagaactgtggggacacgtaaggagaacgggagccgggaatggaaagcccggtacaagcgaggtaccagtatggtaggaaaatccgccatgcaatgggaagacgtgatgtggagcgaagattagtagcgaagcccgtgagccatgcgtcaagaaaagccgctatcgttcatattgtacccgtaccgtaaaccgacacaggtggatgaggagagaatcctaaggccggcggaagaagtattgccaaggaactcggcaaaatggccccgtaacttagggagaaggggtgcctgcgagagcaggccgcagagaataggctcaagcaactgtttagcaaaaacacaggtctatgcgaaaccgaaaggtgaggtatatgggctgacgcctgcccggtgctggaaggttaagaggagaggtcagacgtaagtcgaagctttgaatttaagccccagtaaacggcggccgtaactataacggtcctaaggtagcgaaattccttgtcgggtaagttccgacccgcacgaaaggcgtaatgatttgagcgctgtctcggcaatacatccggtgaaattgaagtgccagtgaagatgctggctacccgcgccaggacggaaagaccccatggagctttactccagtttggcactggggtccggtgttgcatgtacaggataggtgggaggctgagaaacggtagcgtcagttgccgcggagccgctgttgggataccacccttgtgatattgggcttctaaccagccgccgtgaaccggcggtgggacaatgccaggcggggagtttgactggggcggtcgcctccgaaagggtatcggaggcgcccaaaggttccctcagaatggacggaaaccattcgaagagtgcaaaggcagaagggagcttgactgcgacaccgacgggtggagcaggtacgaaagtagggcttagtgatccggtggtattaagtgggaatgccatcgctcaacggataaaagctaccctggggataacaggcttatcactcccaagagttcacatcgacggagtggtttggcacctcgatgtcggctcatcgcatcctggggctgtagtaggtcccaagggttgggctgttcgcccattaaagcggtacgcgagctgggttcagaacgtcgtgagacagttcggtccctatccggcgtgggcgtaggatatctgagaggagctgtccttagtacgagaggaccgggatggacggaccgctggtggaccggttggcttgccaaagccatggccgggtagccaagtccggaagggataaacgctgaaggcatctaagcgtgaagcccccctcaagatgagatatcccattcttatgaagtaaacccccttgaagacgacgaggtagatagggcagaggtggaagtgtggtaacacatggagctgactgttactaatcgggtgagggcttgaccaagaaacgcaggttaagaattgattcaaagagtttgattaacgatcaacaagcatgtatgtagtttttaaggtacaaaccttaaaatggcccagtggctcagttggttagagcgccgccctgtcacggcggaggtcgagagttcgagtctcttctgggtcgttacagcttagctgtaatgaattaaatatgggatcttagctcagctgggagagcatctgccttacaagcagagggtcataggttcgagccctataggtcccatagattatggatggattcccgagtggccaaagggggcagactgtaaatctgttggcaccgccttcgaaggttcgaatccttctccatccacttaaatgccgatgtggctcaattggcagagcagctgatttgtaatcagcaggttatcggttcgagtccgatcatcggcttttaacatttaataacgcggggtggagcagtctggaagctcgtcgggctcataacccgaaggtcataggttcaaatcctgtccccgctacttatgcccagatagctcagttggtagagcagaggactgaaaatcctcgtgtcgctggttcgattccggctctgggcatgttttaatgtaaaacatgcgaacggctggttagaaaaagcctgagtattaattaatttaatatggggtattagctcagtcggtagagcacttgacttttaatcaagttgtccggggttcgaatccccgatgcctcactttttaagtggatcagataaattcccatttattgctcaaggcagtaggtgggaattttgttttatatctgtgcgagtatagtataaaggaagacggttacgttgtgattcagcgtaaccgtcttttttatatcatagaaaattacgtactgacgaacgaatcagcagagccatcgagtaggatttcaatggtaggagtatgtcaatgcgataaaaaaaatattatggacattttcgacaaaattagagcatagctgtacagtattaagactttatcataagaatgagcaggaaatctgttatgatcaggattactaggaagacaatagagatggtcatagaatagatattctggatctggtttggattctgcggatcacatttgatctgaacatgctttccgggggctttgccaaggcgtaaaaactcgattcggtcagctgtgtaattttgttccttgtaggtgtaagagtacttcacatagttatgataattggaactatgaggcttgttaggattatttgagcggctgacagatgatataacagcatctacaggtacgtaatcatgatattttatggcggaacagatagttattgccagaaaaaaaacagttccaattacgcagcagcccagaataaccggtaaaatttgtcgggcttttggatttacggtgacactcatgatttttctcctttcttggttgatagtctgataatttacgggggattaattataaatgatttcgaatgatctcgaaaatttataattggtgaacattatagcatagtacagcagaagggaaaagtgcttatgaagagaaaaagtgcgtcaaaaaaattgctgccgctgatgctgatcctgatgttgatcttaggaatcagtatgccagcaaatgcagttgaagtcaaagatacttcccaaaatatatacaatgttgtccagaacagtgacggaacttatacgatcacagtaaaagacggaaatgcttataaaaatctggaaaccggaaaggttgcactgttttctgcaaaggaaatgggaacagatattgcattaaaagtccagaatatcacaaaggtgaagctgtccggttctgttgctgttacgattccggatgtaagctggatgccggatttagctggggaaagatagaggtaaagcattttattgcgtcagttacaggaaaagctgatttcgaaggcggactttatataagtggcgtgaattcagagcagcagatcaaacatgcaagtggaactatggaaacagtcagcgatgtacttgaactgggacgagttcctataaagcttggtacaactggtctttctgcagatctggtggtttctctgttttatgatgtgtccgggcagtttgttgtgaaatattccgttgaagcaactggcggatatgaattcaaagatggaaatggaagatttagccatgatttcagtcagactttgacaccggtcacaatagaaggatctgcgaaatgcggtcttcagtttggattaaatctgactgcattggagacatgggatctggcgggaattgatattaaggtaggacctgcggcaaaggcaagcgtatcctatacagttcgtgatgccggaaatgtgctttgttctgatgtaagaacctatatttacgcagcgggtgagttgaatccggatacggtggtcggaaagttcctgaaaacggtatggcattatacgttgtccaaggattttctgtctgatgatgacgataatccactaaaattgaaggttcattttgaaaatggaacactggtagataaatgtacagtcggagccggaagcattgagggaagcgttttggattcaaacagcaaagctcctgtaaaaaatgccagcgtggaagcatattccggaacagtcaaggttgaaaaaactttcacgaaagaagatggaacttattcatttaatgatcttgatgaaggaacctacaaaattgttgtcacagcaaccggttaccagaaatatgagagcagttccatggaagtatcagcgaaccagatcacatacgcagaatctttcctgatggtatccagagcagaagccggagatggtgagctgagtggaagatttattcattccatgaccggtggaaatatagaaaatgtaacttatgaattacgtaagggctgggataatgtgatcggagagactgtgaaagaaggcgtatcagcagatggaacctatacgttgaacgtgccagccggaaactatacgctgaatgcaagcaatgaagattttgtttctgcccatatcaatgttgtagttcaggcaaatgcatgcagtgaacgtgatgtaacaatgtcaccgaccaatatcagtgcaggagatgagggacttcttcagatcgtgcttacatggggagaaactccgcgagacctggattctcatctgctgggacctgctgatgaaaacggagatgactacttccatgtatactatagggataaaaatgcatattcagaggatggagatgtaatagcaaatctggatctggatgatacaagcagctatggaccggaaacaacaaccatatacaaaggcttcaccggaagaaaatatagcttttatgtatacgattatacaaacggtgaagatgatgcgagtacagaattatctgcttcgtcagccaaagtaaccgtttaccggggtggaaaacagatctaccaggcaaatgtaccggttaacagggaaggatacctgtggcatgtatttgactatgatgtgcagtcaaacaagcttatgccagtcaatacctttgtatatgattatgaagtgccggaagcaaatgcaatggaagataattcaggcattatttcagaaacagaagcccttgagatcatccgaaacagtgaaaagaaagctgaagaagagagcagcgaggaactcaatatgagttctgaagaaggaaagacggacgataatactgaggaagagatatttgatgattccagtgaagagccggagatatcagaaagtggtgatacggctgaagtaattgagtttccgaaagactctgaaacggaagaagaaaatgacggaacaggaataacagaagaggatagtgagcgtgcggaggagctgccggtggaagatatttatgagggatcagaggagttaggtctggcaggataaaaatgtactgtgatcgaacagatctcgctgtttgtggcagtacgcatattcgggccccatatgccggcaccggaggtaacgatgttgtgcatagtcccctttttcaggtaaccgcaggaattttcccagaccaggccggtgatgatgttcagagggaacagctggccgtcatgagtatggccgcagagatcaaggtctgcgcctgcggctgccacttcatccagctgaccgggctgatgatccataaaaataatcgggagtgttttgtcaaggcaggctgtaagctggtcaggatccttacgggtgtcggacatttttcggcagcgtgaaggatccttacggcctgtcagataaaaccgtttatctatgaggacggtttcgtcatcgagaagccggatgttggcagattccagaaaattccgcattctgggatcatcataatctttttttgcattgcggaaggtaaaaccggccagaatcggttcgctgagatcatggttgccccaacaggcataaacgccgtatctggatttcagcgaacggagaatggccgctgtttttttcgggtttttgatcccttcatattcgttatcaaaaatatcgccggcaatacagatcagatccggatcttcggcgttgatcttttttacaagaagcccggcatgtttttctccgatactgtaaccgaaatgaatgtctgcgagcaggacaatcttcagggagtccattcccttcacctgcttgtttattttcacatcataagtttttgtcttaatattccactgattaaaaatcccatagagactgacaccaatgatcagaagggtgcagacagcgcctgtgactacgaaggcttttcgggaatacatccaggccggatgaagcgtatgcttcaggatcagtctgcagagatctgtagttacgattacgatcaggatgtaaagaaatgttccctgaaaataatttgccgtatttttcaggaagcggtggagcgcaggtggcttccggatgagaaaacaggtcagaagagaagtggacagaaaaatataaacacctgcaaagcatgcccggaacgcaaaggtctggaaaaaatgagtgcaggcacccatccacaaaatcatccagcggacgatataaatattaatgagaatatataatggtgcgagaaagatggcaagcatggtgtgtgatacctccattcgtggcaagcaataagcggtgagcaggactgatcgctgcagatactttttggattgatacatagcatttccataaattactgcagcatgttcggaataactttttttgatgcattgattcatagaactgctatagtatacagcaaataataatttttggcaaaagaacatatattaggaaaaagaacgcttatggtgtttttatgaaaaaatatgcgcttcttcgatattgtctggtgtttttagcaattgttcttccttatttttcggcggcaaccattaatggaccggagagggtcctggcagagagggtgccggatatggaagaatatctcccggtcattgttttttcgcagatttccccggatatgaaaaaagaaaccataaaagcgcagactgtgatcgcacggtcgaatattcaaaggtggctgggtgaggggaaaaatctggcagagatcctgagggaaaacggaagtacagaggaagtctggagatatttttttgcagaaaaaaggcagatctatgagcaggcagcaaaagagacggatggacaggtacttacatatgaaggaaaagtgaggctgactccctggcataagagaagcgcagggaaaacccgcagcggggaagaagtttttcatgatgaggcgtatacatatctgaaatcggcagatagcagtgaggacaaaaaatatccggatcatataaaaatcgtggaaattcctgcggggcagctttccggggagctgaagatcaaaaaacgggacagtgccggttatgtgacagagcttacgatgggggaaacacttctggagggagaaagctttgcagcgggaatgggactggaatccgcgaatttcagtttgaagaaaaaggatgatatttattatctgcgagtgcgtggcagcggtcatggtgtgggattttcccagtttggtggaaatgagatggcaaaaaacggaagcagtgcggaggagatcctgaaaaaatattttccggagatggagctgaaagctgaggattaaagaaagtcaggcatccgaagcaacgtctgataaaaaaatattcaaaaaatgaatagacagccatattctggacactctatagatatagaaatggtgaccgaaacggcagctttactgctttttctgttactgaaaatgaacatatcagacagaggtggaaagaatatgaaaagtaaaatcgtgagaggtattatcaacggaggtgttctggcagcagtggcggcacttgggattactgtttatcagcttggaacaaagcccatcgcagaaaatccccaggaggaaaattctgtacaggtagaagagaccgggctggaagaagagctttcggacggggaaaacgcagaggatgcggcagctgccggagatggctggcaggatgcagcacaggatgagatctctgatggagaaaccggagatgaagcaggtctgtcaggagcttcagaagccggagcagatggagtgacaggaagcatccgtgagactgcaggaagtggtacagccgaaaatgcagcggcagatgcagataatggaagtggtacggaggataggagcgtgtctgcggcagcaggtgcagacagaagccgcacagatggcactggaaatacagcagataatgccggaaatacatcggcagagggagcggtgaataacggagctggagcttccacagataccgcagagacctcagctgtcggaattgcggcacaggctttggattttacggaggattccattatggaatggccggtcagaggaacggttcttgtggattacaatatggatgaaaccgtatattatccgactttggatcagtatcgtgtgagctctgccattgctttgcaggcagtggaggatgcgccggtgtatgcggcggcagatggccaggtgctttctgttgtacaggatgcctgtacgggaacgactgtgactatggagctgggaaatggttatcaggcagtatatgggcagctgaaggaccttactgtggcagaaggtgacacagtaaaggagggcgaagtgatcggaaatatcagcgcacctaccaaatattattctgtagaaggcccgaatctttattttgcaatgaaaaaggatggcgtgccggtagatccgtttgaatatctggaatgacagggaaaaccgaaaaacagatatgccggggagatttttagaaacagagtatggaggatacgggatgggagatatatgcatcccgtattctctgcgttgtgaagcgtattagtgagaacggagtgagcagtaataaaaatttccatttacataggaaaagaatcttttttaccggaaagaaaccgtgtataatctatattataaatatgcatacaaggacagatataacaggacaaaagaagaggtacataagttatgaacattaatgaaatagccaggcttgccggagtttccagagctacggtatccagatatctgaataatggatatgtcagcagtgaaaaaaaggaagtcatccgcagggtgatccaggagacaggatatcagccatcctcccaggcacagacactgcggaccaaaaaaaccagtctcatcggtgtcatccttccaaagatcaattcagataccataagccgtgaggtgacagggatcagtgatattcttacacggagaggatatcagcttattctggccaataccaataatgatgtggaagaagagctgaaatacctttctctgtttaaagaacgtcaggtggacggagtggtttttattgctaccatgtttaccagaaagcataaacagatgctgaaggattataaggtaccgatcgtgatcctgggacagcatctggacggatatccatgtatttatcaggatgatcataaagcagcttttcaggtcacggagaagctggcggagaaggggaaaaagtttgcctatatcggcgttacagataaggacgaggcagttggtgcctgcaggaaaaagggttttatggatgctatccataaagctaagctggaggtcgtgccggagaggatgaagatcggaagctttaccatggattccgggtatgagatggcgaaggagctttttgaggaggagccttccatagattctcttgtgtgtgctacggatactatggcggtgggcgccatgacttatttgaaggagatcgggcttcgcattcccgaggatgttcagatcgcagggattggggatggagttccgggtaagatcgtggaaccgaagctgacaacggtacatttttattataagaccagcggaatggaggcagcagccatgctggctgatcttattgagaacgataccgggatcagcaaggaaataaaaatgggatgtgagcttgtggaacgggaatctcacaggtaacagagaatatcctcgcagacagaggaagaaattataagttattgtggaacaggagcagatcttttgggagaaaaagacctgcttcttttggtgtggtgctgtgttatggctgagcaaacacagaaaaatgccagattttttctgcgatgtcctgactggtttgtctgttttgcatctgttcttatggaatatgtacaattttgactgaagaaatttgtgcgatgttgcggatttacaaataataatgcagtagttataatacaagtaagatgtgagaacgattccatataagaacacaagcaataacataaaacataccattgaaaagtgctgaaatcatcaaaaagcttaaaaaatggaaaaattaccgtcccttgtatgaatggatgtatgaaatcaatctcataaataaatgaaaaacaatggatcagagataataaatcccgggaagctgaagaaagaacagacagatctgatccgaagaaagggaaagcagaaagagatgactgtccgggaacagtagcagaaaaggaggaaggacatggattacagaaagacagcacaggaaatctatgatcatgtaggaaagaaagaaaacatcatttccgcggcgcactgtgcaacaaggcttcgtctggtcattgcggataatgacaaggcggataaggaatatatagagaacatcgacggtgtgaagggcgtgtttttcgcacagggacagatgcagatcatcctgggaacaggagttgtaaacaaggtttatgatgaatttatccagatcgccggaatatcagagagtagtaaggatgagcttaagaaggtggcagcatccaaggctaatccgatacagagactgatcaagacactgggagatatttttgtcccgatcatcccagctatcgtagcaagcggatttttgatgggaatcatggaagccctgaactttatggtaaacaacggcttcctgaatattaacaccaatggttccatttatgtatttgcacagcttttcagtaacacagcgtacacattcctgccgatcctcatcgcttacagtggtgcaaaagtattcggcgccaacccttaccttggtgcggttatcggtatgatcatgattcatccgaatctgcagaacgcctggacagttgccacggaaggcgtacaggccacacagaaagtatggttcggactttactccattgacatggttggatatcagggacatgtaatcccggttatcattgcagtctgggtactggcacagattgagaagagacttcataaagtcgtacctgcaatgttcgatctttttgtaacaccgcttgtcagtgtttttgtaaccggctatcttacactttccattatcggaccgatcttcgtaacagttgagaacggacttctggatgggatccagtggctgatcgcactgccatttggaatcggaagctttatcatgggtgccttttatgcaccgactgttgttgctggtgttcatcacatgtacactatcattgaccttggacagctggccaaattcggcgttacctactggctgccacttgcatctgcagctaacattgcacagggtggtgcagctcttgctgtaggcctgaaatccagaaatcagaagatcaaatccatggctgttccttctgccttaagcgcatgcatgggaatcacagagccggcaatcttcggtgtaaacctccgcttcggaaagccgtttatcatgggctgcctgggtggtgcatgcggagcactttttgcctccattagcagtcttggtgccacaggaacaggtgttaccggtatcttcggaatcctgctgtgcctgaataatccagttggttatatcctgatgtttgccatcgcatttggtgtggcttttgtgcttacctggatgttcggatataaggatgaggtacaggaaacagctgaaaaaaatattgaagcagagaaaaaatcagatgctccggcagaaattgcccaggagaaaacttcagagacaggtgcacagaccctctacagcccgcttgagggaactgcgatcccgctttcagaagtaaaggatgcaacctttgcatctgaagtccttggaaggggcatggcagtgattccgtccaaaggtgaagtaaaagcaccctgtgacgctacggtttctacaatttttgacacaaagcatgccatcgggcttgcaacagaaagtggtctggagctgctgatccatatcggcgttgacaccgttgaacttggcggtaaattctacacagctcatgtaaaggacggtgacgtggtcaaaaaaggccagacactgatcacctttgatatggatgctattaaggcagccggctatgatgtgaccacaccgctgatcgtaaccaataccgatgattatgaagaagtaaaaatgcttgcagaaggaacagtaaataatggttctgaagtactggaggtaaaataaaatgagttctctgaccaaggtccttgcagaggaagtgcgaaaaatcgaggaaacggcagcagttgccaggacgatgcagacaaaccgtctgacccatcatctgatgccgcctgtgggatggctcaatgacccgaacggattatgctggtacaagggaagatatcatgtgtttttccagtattctccgtttgaggccaacggtggactgaaattctggggacattactccagtgaagatatgatcagctggagatatgaaggggttccgcttctgccggacagcatttatgattgtcatggtgtttactcaggctctgccattgcggagaaagataagcttcatcttttctacacaggaaacatcaagatggatggagattatgattatatcaataacggaaggcagtccagcactcttcatgtggagagtgcggacggcctccatttcggaacaaaggaggttgcagtttcctgcgaggattatccggagaattacacctgccacatccgtgacccgaaggtctggaaggagggggaagagtaccggatgatccttggcggccgtcagaaaagcgaccagggcgccgtacttttttacagatccgaagatctgaagaactggaaatttgacagtgagcttactacagaaaaggcattcggatacatgtgggagtgcccggattttttcactcttgagggacaggaggtgctttctgtatctccccagggactgaccagagaagagttccgttttcagaacatctatcagtccggatactttatcctgaaggatggaaagccggaggaaaaagctttccgggaatgggatcacggctttgatttctatgcaccccagacattccaggatggaaagggcaggcggatcctgatcggctggatgggaatgccggatgcagatgaggagtatgtgaatcctacagcagagagcgaaggctggcagcattgcctgactgttccaagggaagttacgtataaaaacggaatgctttatcagtatccggtggaagaactgaacgggctgagaaagactggcgtttctgtcagcggttccagtgcggagattccggtgaatggaccgtttgatctggatgttcaggtaaaaggtgagcagggtaaagtaagccttggggaaaatctcttcctggaatatcaggacggagatatgatcttaactctctccgagaaggccggtgccggacgtaaagtacgtaaagcgcatgttccgtctggtgtgatcgaaagcatcagagttcttgcggatactacagctgtggagatttatgtgaatggcggagaggttgtttttgccaccagatattatccggaaacgcaggagcaggctgtgaaggtggaggatgtggagtgtgatgggaagatttatatgctgaagaattatgtgatggtgtaggctgggtttattgatcgtgaaatacagcaagatcagaatacgaatacctatagagcagctatgcagtgaattccatattcacagaaataagaaatgaccgtataataaagcaggtgggaaaatccgcagccggaatcccgacctgctttatctttgttataagtgaaatacatgaattgtgccggctgcttgagtatagaaggatggctgctgaagaaatgttggtggctgtctttacatagaaagaatgcggccgactggatgtttgttttacaggagaggaaatatcacggaagacagatcacactgtccagaaaagtgttcagatatttgttttacaggaaggcaaatatcagggttgatgttactgaagatgtactggcatttggcattgtattgcataaattttttacagaagaggagactgctatgaactatacatacatcgtacagtgtgcggatggcacgctttacaccggctggacaaactgccttgccaggcggatgaaagcccataatggaggcaaagcaggcgccaaatatacccgggccaaaaggccggtgaagctggtgtattacgaaggctttgccacaaaggaggaggccatgagccgggagtaccggatcaagcagctgaccagggagaagaagctggagctgatgaaattctgaatgtcgataagcatttcgatatttcaagtgacttcaaagatgtggagcattatgcagcgtaattgaaagataaggatatgtgttctgctgaatcttattggtacctcaacataacaactgaatcaaaggtatccccattgtcgatccactgacagctgccatcatttttttcacagatatcttcaattatggacaggccgaatccatggttgaggatatctttttttgatgttttgtggttgaatggtcgtgccggatctttgctgttttgcatgtggacagtaagaaaaccggcggacatttttgatgttacagagataaacagcgattcagaaccggaagcgctgcagctttctattccattatccagcaggttgaaaaatatactgctcagttccgaagagggaatattggatttctccggaagaagaacctcgtaggtaactttgatatttttctgcatggcaagaaatcttttgtccgcaaggatggcgttgatcaggctgtcctgacagatgggatggaaacgttctctctgaaaatcatcggttatggcaggcaggtagtcctggatcttattatattcgttcgttttcaggtaattctgaagtgtctgcagtttccggatggtagcctgttggaacgccagagtctcctgctttctggaaacaaacagctgctcctgttctttctgtaactgttcctgcttctgaagagcctgaaattttgcctcttcctgagcatttttgagcgatcgtctggcaagaaggtagatcctgcggtaagtgagggccagaaaaaagagaagcattatctggcaaaacagagcatattcctgtagcagagctcccaggaaaagagatgcctgaacacagaaaagttctataaaaagaatagtaaagcctcgtttcataaagtcctcttttccggcggaagttctgaaagaattgtttctagatatacatctgcctcaagatatttttgggtgcggatcagataattcagtgaaaagagatggttttccatatcgtgattccattttcgcacaaattgatattcttgttccatttcggttgtatattccagctgtttctgaagaaaactcatctgctgaaccaacagttcgtgtcttttttctctgagagaaatgttgtgaaaagccctggctatgatcagacagcagagaagattgagaaaccagtacaatacgatcagccattttaacaaatgtagcaagaattctcccacctcttcaggtggtgagatgaattgcacatctgagcatatctgctcaaaaaaatctctatagtataaaagaaacatttgttctctcttccctgatgtagtatactgaaaagaacaattagttcataaatacatatccgtcgatataagaaaaaggatgataaatataatggagttagaccatgaaagatgcattctggggtcagatcttcggtctgctcagtgcaggcggagcaacgattgaaacgatacggcagtatatagaaagccagggtgagaagaatgaaccgcgccgtaaaaataaggatctatccaaataaagagcagagagttcagatagagcaaacaatcggctgcagccgctttatctataaccagatgcttgcagataagatcagctattaccagaaagaaaaaaagatgctccggaacacaccggccggatataaaaaggaatatccatggctgaaggaggtggattcccttgccctggcgaatgcgcaactgcatctggaaagtgcgttccggaagttttttcgggaaccagcctgcggatttccacgttataaatcaaagaagcatgcaagaaattcatatacgaccaatgcactaaacggaaatatccttttgcaggatacccatctgaaacttccaaagatgtccgtcataaggataaaacttcaccgtcagattccatcagactggaaactgaagtctgtaactgtgagccgtgagccatccgggaaatattttgccagccttttgttctgctgtgagaaccaaacagtggaaaaaagaccggcagagagatttcttgggatcgattttgccatgcagggaatgtgtgtattttctacaggagaaagagccgggtaccctatgttttacagaaaagcagagaaaaaacttgcaagagaacagagaaagctctcccactgtgaaaaagaaagccggaactatcagaaacagaaaaaaagggtagctttatgtcatgaaaagataaagaaccagagaaaagatttccagcataagctcagcagggagcttgcggaaagatatgatgcagtatgtgtggaagatctgaatatgaagggaatgtccggagggctgcaccttgggaaaggtgtgcaggataacgggtacggtcagtttctgttcatgctgggatacaagctggaagaatgcggaaaacatcttataaaagtagaccgttattttgcatccagcaagatctgcagtgtatgcggacataagaaaaaggaactggcattgtcggatagaatgtatgtttgtgaatgtggaaataggatggaccgggatgtgaatgcagcagtcaacatccgtgaagaaggaaaaagaatctataaagaatgtgcctgacggcacaagaaaaaaatccgtaaccggataaacataaaaaacaaaaccgcgggacacgcggggatagcctgttttagctttgccctaaagggtaatcgagcaggaagcccccacttcaaaatcgtaagatttaagtggtgggagcatgtcacggtatccgaaaggtgagattgttatctatctgatcacagagtaactcagtggatcgccataccggctacaaagaaatacattacaacaaaatggcacacacttcccagcatcacaaaaacatgaaatacttcgtgggaaccgaaattcttatgcttcgcattgaagatcggaagcttcaaagcatagatcacaccgccgatggtatagatgataccgccggcaaggagccatccgaagcctgcgcggggcagattgtggaagatcggaacaaaagcaagtacacacagccagcccattccaatgtagatcacagaggaaagccatttcgggcagttgatccagcagcccttgaggatcattccgatgatggcaacggtccatacgagggcacagaggatatagccggtgcgtccgtggagaacgatcaggcatacaggagtgtagctgccggcgatcatcacaaagatcatcatgtgatccatttttttcagacggcggttcaccttgactgtagagtttacggaatggtaaagtgtgcttgccaggtaaagaaggatcatggtaaggataaaaacacttactgcaaaaacatggagaacgtctgcgcttctggccgccttcacgatcagcggagtggctccggccacggcaagaagcatgccgattccgtgggttatggcgcttcccggatcttttaatttaaatttcatataaaaacacctcctgcaaaaaaatctgctgtttatatcatatggacaacttcaagatcggttcatcaatgacggatcattgcgacagtttacaatgtaataatgtagaaactgataaaataacatgtagtattcaaaactacatatcaagtatacgaatactataccactattattcaaaaatgcaacccctattttcgaaaaaaattttatcaggatttatttctgcagcaggcatacgacaatgcggctcctgcgacagataaataagagatttttatgcatatttctcccagtttttcgcataataaccatatgaaaaacaaatagttaacataacattgacgtacaatgaacagaaaatacaggaggaattcaggaagatgaaagcaacgggaattgttcgcaggatcgatgatctgggcagggttgtgattccaaaagagatacgaaagacactgcggatcaaggaaggaacgccactggagatttttacagacagggaaggacagattatcctgaaaaaatattcgcccattggagagctgaatacgtttgctgcggaatatgcagaagcgctggtacagaccaccggactgactgcctgtattacagatcgtgatcaggtcgtggcggcatgcggcagcggaagccgggaactggaaggaaaagagatcagttctgatctggatgcagtcattgccggcaggaaaggcagaatggtcagtcaggacagcagggaaaatatatcagtcatttccgacgctatggattcattttgccagaaaatgatacagccgatcctgtgtgcgagtgacgccattggagcagtgatccttctgactaaaagtgaaaaaacagcactgggagacacagaacgtgcccttatccgcacagcagccggttttcttggcagacagatggagcagtaaaagtgcatcagatgtacagaaaaatgtgtgcagatcaagatataaatatcagatgcagatgccaggagcagcagatcagggaggatgcggacaccgggaaggaaagcagtggtattcttccagagtcagatttgtgatagtgagccaggaagccagaggtttggtcacatagcggatgtgccatggttcgtaagggatgccggtgatctcctctctgttttttgggtaccggaggataaaaccatagagcggagcgttctttttcagccagcggccttctcctgttgcggaaaacctttcggagagctccatatggatggaagggcaggatacatccagagcaagtccgctctggtgctcacttgttcctggctctgcaacgaaaggacttcctgtaaaaagctccttctgtcgctggtaggaacgatatccggaaactgcccacaggttcagaccgcatctgtgacaggcatggaaaagctgggaagcggcttttgcagcctgatactccagaagccgcttcggatctcccggtgctgcttcaaatggaagtccgatatcgataagatgttccggcacaaaggcttccggcagaggatgctccctgctgatcagccgggtataaaattctctgtgcaataaaaaccctcctttccttatccataagcttatgataagaaaggagggtttatgaatgcttatttctgtttatcagagctctttttcactcatttcttccaggagagccttcttcatgtcatagagtgactgggagagatctacataaaccttctgcggattaacgaaacgtctggattcatcccacagtgtgttctgctcctgtttgcagtagtcgcggagttccatgacagatggagacttgtaaacgctcttaccatctttaattaccggaacaaggagctcacggagttcgtaggttccgccaagaaccttggtctttttccaggtgtcaaccgggtcgaagatcaccatagtttcttccggatcgaatttctcatctgcaaggcagatcagatcggccttgatcttgccggtcttcttgctgtagatacggtatacagtcttgttgcccgggttggtaaccttttctgtgttttcggaaagcttgatcttcggctggaaggcatcgctgtcagcgtcctttacagcggcaagcttgtatacgccgccgaatgccggattgttatcggctgtgatcagcttggttccgacgccccaggaattgatcttggcatcctgggccttcaggctttcgataagatattcatcaagatcgctggatgcagaaatggtagcatcatcgaaaccggcagcagccagcatcttgtaagcttttttggaaagatatgcaagatcaccgctgtcgatacggattccatagttcttcagctggataccttcctcacgcatctcctcaaatacacggatcgcattgggaacaccggatttcaggacatcgtaggtgtcaaccagaagagtacaggaattcgggtaaagtctcgcataggtcttaaaggcagtgtactcatccgggaaactcatgatccaggaatgagcatgtgttccaagaaccggaacgttaaacatctggccggtcagtacgttggaagtaccggcacatccgccgatcactgcagctctggcaccgaagatcccggcgtccggaccctgggcacggcgaagaccgaattccatgatgggatcgcccttggctgcgtggcatacacgtgctgccttagtggcaataagactctgatggttcataatgttcaggatggccgtctctacaagctgagcttccatgatcggtgcgataaccttgaccatcggctctctcgggaagatcacggttccctccggaattgcgtagatatcaccggtgaatctgaagttgctcaaatactcaaggaaatcatcctcaaagatgtcaagacttctcagataggtaatgtcttcttctgagaaacggagattttcgatgtattcgatcatctgctccagtcctgcacagatggcaaaaccgccatcgcacggattgttgcggtagaacatgtcaaagacaacggtctggttggtagggtttttgaaatatccctgcatcatggtaagctcatagaggtccgtgagcagagtaaggttatttgctcgcatagcgttctcctttggatgcctccggatattgtgaccggagggaaatacacggttgtttccgctctttttattatacggcttattataacacaaaggagtggattgtaaaattttttttactgcgtaaacccgcatataataaggagttttaacagcagtttaagaaattttgaaaaaaaataaaaaaaattaaaaaaaggggttgcaatttcaaaaaagctgttatataataacatccgtcgcaagcgataaggcaagcgaaaaacaaaacacatagggctatcgccaaacggtaaggcaacggactctgactccgtcagttcaaggttcgaatccttgtagccctgcttcttaagtacctcagttgcgaggtactttttttgtacacaaaaataagaagatattcgcaatccgttgcgcccccaaaaaaaacaagtgcgtttcttcctgccaagtgttacaataaagtatagacagtatgacaggaggcatgaatgagttacagttttgagagtcgagtaagattcagtgagatcggagaagatggctgcctgacgttgccgggaattctggattattttcaggattgctgtacctttgaatccgagcagacaggagtcggcatggaagtattaaaggaacagaaaagagcctgggtactttctgcatggcaggtgatcgtgaagcgatatccgaagcttggtgaaaatataaaagtaacaacaattccttatggattccgtggatttatcggaatgcgtaattttattcttgagacaatggatggtgagaagctggcatgggccaattcctactggtcctttatcaatacagaaaccggtcttccggaaaagctgacaccggcagatacagatccctatgatctgggcgaaaaaatagagatggattatgcaccaagaaagattgcgcttccgaaggaacgggaagtgcagaatgctttttccgtacagaagcatcatctggacaccaatcatcatgtgaacaactgtcagtatatccggatggcagcggatcatctgcctgaggattttaaagttggtcagcttcgtgctgaatataaacgtcaggcagtactggataatgttatcattccggaagtatatatgacagaaaataaagaagctgtagttctcaacgcggaggataaagaaccttacgcagtagttgagtttacaaaataaatacaggcggtagagattagtacatcgtttttgaaacaactataccgtaaaaggagggcgcgctatgcttgaaaaattaaaagaagaagtttacagagcaaatatggatctgccaaaatatggtcttgttacctttacatggggaaatgtcagcgggatcgacagggagcagggactttttgtgatcaagccaagtggtgtggattatgacaagctgacaccggaagacatggtagtggtagatcttgatggaaataaagtagaaggaagatacaatccatcctctgatacaccgacacatgcagttctttacagagcgtttccgaatatcggcggtatcgtacatacccactcatcctgggcaacaagctgggcgcaggcaggcagatcgatcccgtgttatggaaccacacatgcagattacatttacggagaagtaccatgtgtacgtaatctgaccaaaagagagatcgaagaggcatatgagaagaacacgggagttcttattgctgattatttcaaaaacaaagattatgaagcagtaccggctgtgctgtgtaagaaccacggaccttttacctggggtaaggatgctcatgaggcagttcataacgcagttgttcttgaggaggttgccaagatggcatctcgctgcgagctgatcaatccggatgtaaaaccggcaccgcaggagcttcaggataagcattactacagaaaacatggtgcaaatgcatattatggtcaggtaggacaggaagactgatcagaagaaaaaacagtttgacccgatggtggattgtcaatatccgcttgagtggaaatgccgcggaacagtaccgcggcattttttgtcgaaaaatgcagaaaatgtcagatttgctgacctttaacacaggtgccgccgaaatatatgctaatgtcaagaaaaatgcagaacattaacacatttattaaaataggtggcaggatgaaaatatacacttatcagggaaaaaagaacgtttccggagaaaaaatacgccagatgaggaatatgaaacggatgtcgcaatctgcgctggcagcaaaaatgcaggtggaaggagtgatgctggagcgtgacagtatcagccggatcgaaggaggagaacgttttgtagcagattatgaactgcgggtgtttgcaaaggtgctgggagtggatgtgaagtggctgctgaatgagcagtaaataaggcaatattggattacagttcgctggtaatattccgcgaagcgtgttactgaaaacggagtgaaaagtaacaatattggtctgaatggcaggaatctgtgtaaactacttgatatttatgtcggaaactgctacagtataaagaaaaaaagatggccgggaagtcctgcggagggcaaacggtcacggataagaagatagaggcgcggattttatcagtatttatggatgcaaggccctggcaggctgttcataaagaaaggaaaatttgccgaagtgctctggaaggccagatgacagggtgctgggataacgcagaatatgcgttgtactgtcacggatgtggagcgctatcggtagcacttcgggagatctgcatttaatatgctgaatggagattttctgacgggctattagttaaataaggattatttaaccggaggtgttcttaagaagagacagcctccgtttttttgtccccgaaaagggaggagaaaaatgagtaaaaaagcaggaacagcattgtctgttatggcaatggtattcatgggcgcactggcaagtcccctgactgtgctggctgcggatgcggaggagacttaccagcctgctctgtatgcaacgatctgggcactgcttccacctcttgttgcgatcgtccttgcactgatcacaaaagaagtatacagttctctgtttgtgggaattgtagtaggagcactgatctattctggatttaaatttgaaggaacggtaacacagatttttgagggaggaatcatcaaggttctttctgacagctataacgtaggtatcctgatcttcctggtaatcctgggatctgtggtatgtatgatgaacaaggccggcggctctgccgcattcggacgatgggccagcaaaaagatccacacacgtgtaggtgcagagcttgcagcgatcatccttggaatcctgatcttcattgacgattattttaactgtttgacagtaggaagcgttatgcgtccggtaactgacagacatcacgtatccagagcgaaatttgcatacctgatcgatgcgacagccgctccggtatgtatcatcgcaccgatctcatcctgggctgctgcagtcagcggattcgtagagggacaggatggacttgcgatttttgtaagaaccatcccgtataacttttacgcgatccttacgattgtaatgatggttggcatggtactgatgaaaaccgagtttggtgccatgagaacacatgagatcaatgctctgaacggagatctttatacaacatctgcaagaccgtatgagaatgcaacggatgatgagacaccgaatccgagaggaaaggtgatcgatcttgtgatcccgatcgttatgcttgttatctgctgtgtcatcagtatgatctatacaggaggatttttcagcggaacagattttgttaccgcattttcacagagtgatgcctctacaggccttgcaatgggaagtgcttttggtctggtgtttgccattattttctatatgatccgccgtgtggtcaatttcagagactgtatgggatgcatcccggaaggattcaaggctatggtaccggcgatcatgatcctgacctttgcatggacactgaaggctatgacagactcacttggtgcagcggtattcgtagaagaagccatgcgttctgttgccggtggtattgaagttatccttccggccattattttcctggttggatgtggacttgcatttgctacaggtacttcctggggaacctttggtatcctgatcccgatcgttgttgcggtatttgagaaatccagtcctgagatgatgatcatttccatgtccgcctgcatggcaggtgcagtttgcggagaccactgctcaccgatctccgatacaacgatcatggcttccgcaggagcacagtgtgatcatgtgactcacgtttccacacagcttccgtatgcgatcctggctgcggcagtatcctttgtaacttatattgttgcaggctttgtaaaaacagcatggatcgctcttccggtgggaatcgtgctgatgctgatcgtactttttgtcattaaaatgatgaacccgatgccggttgagaaaccaacagaataacagactgacccaatgtgggggcagattcccccatgaatgtcaaataaaaggcagtgacggaaagaaatttccgaagctgccttttttgtgctttctataataattctcttatgttataatgcaggacagacagcaaatagtaaatgatcatatatagttttaaggaacaggagtaagaatgatagaattaggtaaaaaacagaaattactggttgtaaaaaccgtggatttcggaatatatcttggagaggatcgaaacgcacctcagaatgagagggtgcttcttccgtccaaacaggtaccggaaggaaccaaagcaggtgatgagatcgaagtattcatctataaggattcccaggacagactgatcgcaactacccgtgagccgatgcttcaggtaggacagacagcagttcttaaggtaaaacaggtcaccaggatcggtgcttttcttgactggggactggagaaggatcttcttcttccgtatcatgagcagaccaaccgggtccgtgaaggcgaggagtgtctggtagctctttatgtagataagagcagcagactctgtgcaaccatgaaggtgtatcattatctttccaccagaactccttatgtaccgggagattcggtaaaggggcgtgtctatgagatcagtgggaatttcggcgtttttgttgcggtagatgataaatattccgccctgatcccggcacgggaggcaacaggcaagtacagaccgggagctattcttgatcttcgtgtcacagaggtgaaagaggatggcaagatgaacgtcagtgaccgccagaaggcttacatccagatcaatgaggatgcagagagcgtattcagcgtgatcgaggaatttgcaggggtgctgccatttgatgatcatgcctcaccggaagtcatcaagagagagtttggcctcagtaagaacgcattcaagcgtgcagtcggtcatctgatgaaggaaggaaaagtagagatccgtgacaagaggatctacattaaaaaataacaaggtgttgaccggctccggatcagacacgctccggcacgttcagagaaaagtgcagagcggggaggatccggagccctgttttttacgataaggagaataaatttggagtttacacatttacatgtccatacagaatacagccttctggatggctccaataagatcaaagaatatgtagccagagtaaaagagctgggtatggacagtgcggcgatcaccgatcatggcgttatgtatggtgtgatcgatttttacagggctgcaagagaagccgggatcaatccgatcctcggatgtgaggtttatgtggctccgggctcccgttttgacagagaagtgggaagtggggatgaccgttattatcatctggtcctgctggctgagaataatcagggatacagcaacctgatgaaaattgtatccaaggcattcgtggaagggttttattacaagccacgtgtggatctggagcttctggaaaaatatcacgagggtatcattgccttaagtgcctgcctggcgggagaggtcgccagatatcttgcacgtggaatgtatgaggatgccaagatcgcggcattacgttaccaggatattttcggaaaaggaaatttctttctggagcttcaggatcatgggatcccggagcagcagactgtaaaccagcagcttctccgtatgcacagagagacggggatcgatctggttgccaccaatgatgtgcattacactatggcagaggatgcggaaccacatgatgttcttctttgtctgcagactcagaaaaagctcagcgatgagaacagaatgcgctatgagggcggccagtattatgtgaaatcaccggaggagatggcgaggctttttccatatgcgctggaagcgctggaaaatacgcacaggatcgcggagagatgtcaggtggagattgaatttggtgtgaccaagctgccgaaatatgatgtgccggacggatttacctcctgggaatatctgaacaagctttgccatgagggacttgagcagcgttatcatccggtaacagaggagctgaaaaagcgcttggattatgagttgtctacgatcaaaaacatgggatatgtagattactttctcattgtatgggattttatcaaatatgccagggacaacgatatcatggtcggtccgggacgaggctctgccgcaggaagcctggttgcctatacacttgggatcacccagctggacccgatccggtatgatctgctctttgaacgtttcctgaatccggagcgagtatccatgccggatatcgatgtggatttctgcttcgaacggagacaggaggttattgattatgtaagaagaaaatatggtgatgactgcgtggttcagatcgttaccttcggtacactggcagcccgcggtgtcattcgtgatgtaggccgtgttctggatatgccttatgcccaggtggacaccatcgccaagatgatcccacaggagctgaatatcaccattgacaaggcactgggaatgaatccggagtttcgcaaggcttacgaggaacaggacgatatccatcgtctgatcgatctggcaaaacgtctggaggggcttccgaggcatacctccatgcatgcggcaggtgttgtgatcagccagagggatgtatcggaatacgtacccctttccagagcacaggatggttccattgtcacgcagtttaccatgacaacactggaagagctgggacttctgaaaatggatttcctgggtctccgtactctgacggttatccagaatgctgtgaaaatggtggaaaaaagtaccggtatgcttctggatatgcaaaagatcgactacaacgacaaaaaggtactggattctctcggaacaggacgtactgacggcgtgttccagctggagagtgccggaatgaaaagcttcatgaaggagctgaagcctcagagccttgaggacgtgatcgcgggaatttcgctttaccgtccgggccccatggatttcattccgcagtacatccgcggaaaaaaccgtccggataccatccgttatgactgtccgcagatggagccgatcctgaagccgacctatggctgtatcgtataccaggagcaggttatgcagatcgtccgtgagcttgcaggctacacccttggacgaagtgacctggtgcgccgtgccatgtccaagaaaaaagcttctgttatggcaaaagaacgccagaatttcgtttacggaaacgtggaagagggagtaccgggatgtattgccaacggtatttccgaggagatcgcaaacaagatctacgatgagatgacagattttgcaaagtatgccttcaataagtctcacgctgccgcttatgcagtggtttcctaccagacggcatatctcaaatattactacccggtagaatttatggctgcactgatgacatccgttgtggaaatgccgaacaaggttgccgagtatatttcggtatgccgtcagatggggatccggatccttccgccggatatcaatcatggtgtttatggcttttctgttgacaatggttccattcgttatgcactttctgccatcaagagtatcggccgtccggtaatcgaggggattgtgcgggagcgtgaggagcacggagaatatacctccctgaaaacatttattgagcgaaatatcgaccagatcaacaagagagttgtggaaaatctgatcaaggccggagcgctggattgcctggagggaaaccggaatcagaaaatgacggtttatacgcagatcatagacagtatcaaccaggataagaagcataccatggcgggacagctgagtctttttgatattgcgcctgaagaagataaaaaggaatttgagatccgtatgccgcaggcagcagaatatccgaaggagacgatactgacctttgagaaggaagttctcggcatctatctcagcggtcatccgctggagcgttaccggaatatgatggaaaaaatgatctctgcaaaaacttctgattttcagccggatgatgaaacagggataccggaggtttacgataaccagaaagtgatcgtgggtggaatgatcacggataaaaccataaaatatacaaagaataataaggtaatggcgttccttacagtggaagatctggtaggcaccgtggaggttgtggtatttccacgtgattacgaaaaatgccagatgttcctgaatgaagatgcccggctctttattcagggaagagtatccgcagaagacgacaaagccagcaagctgatcctggaaaaggtccgtctttttgatgatatgccaagagaactgtggctccagtttgaaagccgggaagagtacgcaaaagccgagaccggtctggtagacgatctgatggaatccagaggaaacagcacggtggttatttatctcaaagatgtcaaggcaatgaagaagcttccccctgcttatcaggtccatatcgaggattcctggctggagcgcatgtgtaaaaaatatggaagttccaatgttaaaattgtggagagagtattgaaaaacttataaaaatgctataaactatacccgaatatgtgtattacaataggttgtttcataagatggaggataacaatatggcagagaacaaaatcaaaacgatcggcgttttgaccagtggcggtgacgcacctggaatgaatgctgcaatccgtgctgttgtcagaagaggattaagcagcggactgaacgtaaagggaatctataaaggatacagcggtctcttaaatgaggagatcagagatatgacagcaaaggacgtttccgatacgattgagcgaggcggaacaattctttatactgccagatgtgcagagatgagaacagaggaaggacagcagcaggctgcagagatctgcagaaagcatgggatcgacggccttgttgttatcggtggagacggatccttcgcaggtgctcagaagcttgcgaaccttggaatcaataccattggcctgccgggaaccattgaccttgatatcgcatgtaccgagtacaccatcggtttcgatactgctgtaaatacagctatggaagctattgacaaggtacgtgatacatccacatcccatgagagatgcagtatcatcgaggttatgggacgtaacgccggataccttgcagtatggtgcggtatcgcaaacggtgctgaggatatcctgatcccggagaaatatgattacgacgagcagaagcttattgacaatatcgtagagagccgtaagaaaggcaagaaacaccatatcatcgtaaatgctgagggtatcggccattcagaggctatggcgaagcgtatcgaggctgcaacaggtatcgagacacgtgcaacgatccttggtcacatgcagcgtggtggaagccctacatgtaaggatcgtgtatatgcgtccatgatgggtgctcttgcagtagatcttcttgttgccggaaaacgcagccgtgtggttggataccgccatggtgagtttgttgatttcgacatcaatgaggctcttgcaatgcagaagaatgtagattcctacatgtgggaggtctgcaattctctttctcataattacagaaaataaagatatttatgaacttaaaaaaagtttcagacggattgcataaactgaatacgtcacaaataattgccctcggctttgcgggggtgatttttgtaggtggacttattttgtggatgccgttctgcagtgcacccgggcaggctgttaccttcccggatgctgtttttacagcggcgactagcgtatgtgtgacaggactttccacagttgttatggcagtccagtggagccccattggaaaagcggttatcctgtgcctgatacagatcggcggaatcggactgatcgcactggcgaatatgatattcatcagcctccggcgaaaaatttccctgaaaaaccggcggatcatcaaggaatcctataacctggatgaaatgggtggagtcgtggttgtagtccgcagtgtggtgaaatgcgtgtttcttgcagaaggaatcggtgcggtcctgtatgcgttttgctttgtaccggaatttggaataaaaaaaggtctggtgcatgccatatttctggcggtatctgcattctgcaacgcagggatcgatcttttcggggaaacaagcctttcggtatatgtgagcaatccgctggtcaatatcactacgattggcctgatcattgtgtcaggtcttggatttatcgtctggtgggatctgtgggataaattccgcaaggttctgagaaaagagctttccccatccagagtttttcgtgtactgcggcttcagagcaagctggtccttacgatgaccgggatcctggtattttcaggagcatttctggtatttatctttgaatccggaaacccttccacgctgaagggggcaccactgggaacaaagctcatggcatcctttttccagtcagtgacaacacgtacggcgggattttataccatggatcagtcgcttttgtccacacctaccgtgatcatttccctgctgtggatgtttatcggaggatcacccatgggcactgccggtggtgtgaagactactaccattgcggttctgatcctttctattgcagcatatcttcagggaaaaaaggatgtagaggtatacggccgcaggattcgtgagagctatctccgttctgccatggttgttgcaggaaccagtgtgctgatcctttttaccatgacggtgcttttgtccgcagtaatgccgggagtggatctggcagatgttttatatgagatcacttctgcgggggctacagtaggactttccagaggactgacacctcagctgaatgtggcaggcaagtggatcgtgatccttaccatgtatctgggacgtatcggaccgctgacacttggaacagcagttgtgatgcgtgtacgcaacaggccgggaagcacaacgcatctcggtgaagaagatatcatgatcggttaaacaggagaatagaatgaaaaataaatcttttgccgtgatcgggcttggacagtttggaatgactctggcggtgacgctggcagagtcagactgcgatgtccttgccattgatgacaaagaagaaaatatcgaagagatttccgaaaaagtaacctatgcggtaaaagcagatgtccgtgaaccgggaatcctgaaggctctgggagttcagaatgtggatgtagccattatcgcagttgccgaaaatctggaagccagtatttccgcgaccatgcaggccaaggatctgggagtgccctttgtagttgcaaaaagtatgaattctcttcatggacgtatacttgacaaaattggtgcagataagatcatttatccggaacagtccatgggactgcgagttgccagaaatcttatgtccggcgggtatttggatgtgtttgagctttcagcggagttcagtatggcggagttttccatgccggtatcctggagtggaaaaaatctggtagatctgaatgtacgggagcgttttcacattaatatcattggcatcaagcagggtgaaaatgtcacggtagatctggatccttccgaaccgcttccggacaactgttccataatcgccatcggaaaaaacaaggatctgaatgcaagtcgtgaggaattacgttaaccgaatacggattgccggaaggagagaaataaaagtatgataaccagtgtatcaaatgcaaaaataaaaaatgtcatgcagctgaaccagaaggcaaaagccagaagagagcagggactttttgtggcagagggccggaaaatgtttctggaagcaccggaaagctgggtttcccaggtgtttgtctccgagaccgtttcccgggatggagagctgatgtctcaggcagaaaaatatccctgtgagatcgtgaaggattccgtatttcgtcagatgtgtgataccaagactccccaggggatcctgacagttctgaagctgccttcctggagcgaggaagaggtactggcgggaaaaaatcctctggtcatggttctggaggatcttcaggatccgggaaatgcgggaaccattctcaggaccggtgagggcgccggcgtaagcggagttttcctcacaaaaacctgcgtggatatcacaaatcccaaggtgatccgttctactatgggctccatttacagaatgccttttctatatgtggaagatgtggtatcattagaaaagaagctgaaagaaaagggaatccgcagttttgcagctcatctgaagggtgagaattcctatgatcaggaatcctataagggcggcaccgcttttttcatcggaaacgagggaaagggcctgaccgatcaggcagcggaggcagcagactgtctgatccgcattcccatgtgcggaaaagtagaatcactgaatgctgccatggcatcaggaatcctgatgtacgaagctgcaagacagagaagagaataagagaggaggggttttatgacacctttggcctggcttggaatactggcaattttactggtaattgaagcaatcacggtaggacttaccactgtctggtttgcaggcggtgctcttgtggcgtgcattgcctcgtggcttggtgggggaattgttgtacagctccttttatttttcggagtttccgtggtgcttctgatctttaccagacctctggcggtccgctacatgaacaagggcgtggaaaagaccaatgcagagagccttctgggaaaaagagccgtagtgatacagccggtcaacaacctggcccagaccgggcaggtgaggatcaatgacatcgagtggactgcacggaccgcagatgacggggaagaaattccaacaggtgcagtggttgagatcgaagagatccgcggagtgaagctgatcgtaaaagaaattagcaaggagggctaaattatgggtggagttgttgttttgcttgtagtcatcgttcttgtgctgtgggtacttgcatcctgtatccgcattgtaccgcaggcctatgcagtggtactggaacgtcttggcgcttacaaggctacctggggtacaggaatccatttcaaggttccgttcattgagcgtgttgcaagaagagtaaacctgaaagaacaggttgtggattttccaccgcagccggtaattaccaaagataatgtaaccatgcagatcgatacggttgtatttttccagatcacagatccgaagctttacgcatatggcgttgagaatccgatcatggcgatcgagaatctttctgctacaacacttcgtaacatcatcggtgatatggagctggatgagacactgacatcccgagaggttatcaataccaagatgcgtgcttcccttgatgtggctacagatccatggggaatcaaggttaaccgtgtggagcttaagaacatcattcctccggcagccatccaggatgccatggagaaacagatgaaggctgagcgtgagagacgagaagccattctgaaagcagaaggagagaaacgttccaccatccttgttgcagagggtaaaaaacagtccgctatcctggatgctgaggctgagaagcaggcggcaatccttcatgcggaggctcagaaggagcgtatgatcaaagaggctgaaggacaggcacaggcagtccttaaagtacagcaggcaactgcagaaggacttcgtatgatcaaggaagcaggagcagatgaatctgttcttactctgaagagcctggaggctcttacaaaggttgctgacggcaaggcaacgaagattatcattccgtccgagatacagggcatcgcagggctggcaacatccctgaaggaaatcatgacagataaaccggcagagcagaaataaatctgcagccatgaggaggacatattatgaatcttaaaggaagaaatttcctgacactgaaagactttacaccggaagagatcacttacatgatcgaccttgcagcagatctgaaggcaaagaaaaaagcaggagagcttcatgagtattacagaggtaagaatattgccctgatctttgaaaaaacaagcacaagaacacgctgttccttcgaagtggcagctcatgatctgggaatgggttctacctatctggatcccacaggatcccagatcggaaagaaggagagcatcgcagatactgcaagagttctcggaagaatgtatgagggaatcgagtaccgtggcttcggtcaggatattgttgaggagcttgcgaagcatgcaggtgtaccagtatggaatggtctgacaaacgagtatcatccgacacagatgcttgcagatatgctgacagtacgtgaacatttcggcaaactgaaaggcctgaagcttgtatacatgggcgatgcccgttacaacatgggtaactccctgatggttgtatgctccaagcttggtcttgatttcgtagcctgcaccaataagaaatatttcccgaatgatgagcttgtagcacagtgtcagcagtgggcagaagaggcaggttccaccatcactctcacagaggatgtggaggcaggaacaaaagatgcggacatcatctacacagatgtatgggtatccatgggcgagcctgacgaagtatggacagagcgtatccacgacctgacaccatacaaggttaccagacatgtaatggagaacgccggtgaaaaggcgatcttccttcactgtctgccggcattccatgatcttaagacaaagatcggaaaagagatgggcgagcgtttcaaccttacagatatggaggttacagacgaggtattcgagtctccgcagtccaaggtattcgacgaagctgagaaccgtatgcacaccattaaggctgtgatcgttgcaacattaggagagccggagaaataatgtcagatttatttaatgaagaaataatttcacaggcaacacatacaaaatgggcgggcaaaaccgtccattttgcaagagaaacagattccaccaacctctggggaaaacgtgcctggagggaagaaggcgcaggacacggagagttgtttgtggcagaatatcagtccgcaggacgcggacgttttacaagacgatggagtgcgccgccggacagtgccattactatgagtatccttatctgcccggaattttctccgcagaaggcgccgatgctgacacttgttatgggactttcagttgcacaggcagtagcagagctcggtcttgaggtagggatcaaatggcctaacgatgtagttgtttcccgcaaaaagatctgcggtatcttaaccgaaatgaccatgaagcaggataagatcggctgtgcagttatcggagtcgggattaacgtaaacatggaaagctttccggaagaaatggcagataaggctacctctctgtatctggaaagcggacatccctttgaccgggcacaggtagtcggacttgtgatgaagcattttgaggaaaattatgagagatttgtacagacagaggatctcagcggcctgaaaccggattatgagaaaatgctggccaatctgaaccagccggtacgtgtactggatcagaatgatccatatgaggggatcgcaagagggatcaatgccggcggagagcttctggtagagcgtgcagacggtacagtcgaggaagtaaattccggagaggtttctgtacgtggtttatacagctatgtgtaaaacatgcagcacagatcggataaaatttccggcagcaattttccgttgatgttttattgcagtagtggaaaaaacaagaatctccctgctttagctgtggggagtgtcaagttataaataaaggagattttatgtatcaggataacattgtgctctgcggagcaagctcttatgagcagaaatattattttaaccaggattttgcgtctcttcctgagacggtaaagcaggagctgcagatcatgtgtgtgcttttcacagaggatgtaggcgggatcctgacactggaatttgatgaggacggcagtctgcagtttaagactgaggccctggaggcagatgcccgttttgacgagatcggaagtgcactgaagatcaaggaactccagcgggacaaaagagagcttctggaatctctggaaatgtattacaaggtatttttcctgggagatatcccggatgaggaactgcagaaaaaagcagatgccgttgaggaatgatccatgaagatgcagtggaagatcggaaatgtggagataccgaacccctttgtgcttgcaccgatggcaggggttacggatctggcatttcgaagactttgcaaggagcagggtgcaggcctgatctgtatggaaatggtcagtgccaaggcaatctcttttcataataagaacacagaggcgctgatggagatcaatcccggggagcatccggtatccatgcagcttttcggcagcgagccggaccttatggcagaggtggcaaaaagcattgaggagcgtccctttgacattctcgatatcaatatgggatgtccggttcccaaggtggtaaataatggcgagggctcagctcttctaaaggatcctcagctgatcgaagagatcgtccgcagtgtttccggagcagtttccaagccggtaacggtgaaggtccgcattggctttgatgaaaatacgccggtggatgtggtggagatcgcaaaacgggtggaggatgccggtgcagcagccatcgcagttcatggaaggaccagacagcagtattattccggtcaggcggactgggatgctatccgcagggtgaaggaagcggtgactattccggtgataggaaacggagatatcgtttcaccggaaactgcagaagccatgtttaaagaaactggctgcgatgcggtgatgatcggtcgtgcagtacgtgggaacccgtggatcttccgggagctgaaccactatttccacaccggggaaaagctttccagaccaaccgtagaggaagtctgcgagatgatcttgcgccatgccgaagatcagatcgcgataaagggtgagtatatcgggatccgcgaaatgcggaagcatgtagcctggtatacagccggtatgcggcacagtgcgggaatccggagagaatctaataatatttcaagctatgaagaattgaaaaagcttacagacatggtactggagcgataaaagagaaaagtatgtcggagaaaacgaaacgttctattgacaaggaacggggcgcgtgctacagtcagttagcgggaatccgcagaaagttttttgttttacaggagaaaaataatggcagataaaatagcagttttaattccttgctacaacgaaagcaagacggtagcaaaggttatccgcgatatgaaaaaagcacttccggaagctgtgatctacgtatatgataataactctacagatggaactgacgagattgccagaaaagaaggggcagttgtccgttatgagtatcagcagggaaaaggaaacgtgatccgcagtatgtttcgggatatcgatgcgcagtgttatcttatggtagatggcgacgatacttatccggcagagtttgcagctgaaatgtgcagcaaggttctggagaaaggcacagatatggtagttggtgaccgcctttcttctacatattttacagagaacaagagacctttccacaactttggaaacagcatcgtaagaggttccattaaccgtcttttcaaaagcaacatcaaggatatcatgacaggttaccgtgccatgagttaccgctttgtaaaaacattcccggtactttccaggaattttgagatcgagacagagatgacgatccacgccatcgataagaacatgcaggttgagaatgtagtcattgaatatcgtgacaggccggagggaagtgagtccaagctgaatacttatgcagatggatttaaggtcctgaagactattgtgaaaatgttcaagaattacaagccgctggagttcttctcccttatcgcagcagtgctgtttgtggtgggaatggtattctttattccggtgctggtacattttctggaggttgggacagtggaaaagatcccgacactgatcgtcagcgggtttgtgatcctgacagctatcatctgttggttttccgggatcatcctttctacactggtcaatcagcataaacaggattttgagtatcagacacagatggtgactaatcgttataaagatctttttccagagaagaaataaggaatcagaccgggcaggataatacagaaaagccgtgttgaaatctgagatttcgcgcggctttttttgcatatttcagggaccctttttcgacgtggaatgcttgacaatactggggcttttcggtataatacaggaattgtgaatatcctgagatttttacgcccttttttagaaaaaagagctcttgggaatggtagcaacagaaatatccgaagctgtatttttttcagaaaaaacagcacggttttgaaaggaagtaaggcaaaatggaagaagcaaagaagaacttactcacatacgcaggacttagaaaactggaagacgagctgcacgatctgaaagttgttaagagaaaagaagtagcaggaaagatcaaagaggccagagagcagggagacctttctgagaacgcagagtacgatgcagcaaaggatgagcagagagatatcgaggcacgtatcgaggagatcgagaagatcctcaagaacgctgaggttgtagtagaggacgaagtcgatcttgacagaatcagcgtaggctgcaaggttaaggttcatgattatgaatttgaggaagatatggagctgaagatcgtaggttccacagaggctaacagccttgagggaaagatctccaatgagtctccggtaggtaaagcactgatcggtgcacacaccaacgatatcgttgaggttgagatgccgtccggaatcatgaaatacaaggttcttgagatccagagaaacgtataaagcagacaacggagcggatcgcacagatccgcttgaacgacagatagattaaggaggccaacaagtggcagagcagaagaagcaggatgtaaaccagctgcttaaggtacgtcgtgacaaactggcagaccttcaggcaaatggcagggacccgtttcagatcacaaaatttgatcagacacatcattcccttgaggtaaagaatctctatgaagcacatgaggcagagcttctcaaagatcgcaaggagcttgatgtaacaggtcttgatgaagagcaggcaaaagaggctcagaagaaggattatgaagaaagaagaagcatcatggatgcaagcccgatccatgtatcgatcgcaggacgtatgatgttcaagcgtgtaatgggaaaagcttctttctgcaatatccaggatttacagggtaacattcaggtttatgtggcaagagatgccattggaactgattcctatgcagatttcaagaaatctgatatcggtgatatttttggcctggagggatttgctttcagaacaagaacaggtgagatctccattcatgcagagaagatgactcttctttccaagagcttacagatccttcctgagaaattccacggactgacagatacagatacccgttatcgtcagagatatgtggatcttatcatgaaccaggacagcaagaaggtattcatcaaacgttcccagatccttaaggagatccgtaactttcttgcaggacgtgatttcatggaagttgagacaccaatgctggtttccaacgcaggcggtgcagctgcaagaccatttgagacacattacaacgcactgaacgaagacgttaagcttcgtatttccctggagctttatcttaagagactgatcgtaggcggacttgagagagtttacgagatcggccgtgtattccgtaatgagggtgttgatacccgtcacaatccggagttcactctgatggagctttatcaggcatatactgattatgagggaatgatggagctgacagagtccatgttccgttaccttgcagagaaggtctgcggttccacaaagatttcctacaatggtatcgagatcgatcttggaaagcctttcgcacgtctgaccatgaacgatgccatcaagaaatatgcaggaatcgactttgacgaagtagcagatgatgaggcagccaagaagcttgctgacgagcatcatatcgagtatgaggatcgccataagaagggtgatatcatcaacctcttcttcgaggagtactgtgagaaagagctgatccagccgacatttatcatggatcatccgatcgagatctctccgctgaccaagaagaaaccttccgatccgaacaaggtagagcgtttcgagctctttatcaatacatgggaaatgtgtaacgcatattccgagctcaacgacccgatcgatcagagagagcgttttaaagcacaggatgcccttgcagatgcaggtgatgaggaagccaaccacacagatgaagacttcctgaatgcactggagatcggtatgccgccaacaggtggtatcggatacggaatcgaccgtctcgttatgctcctgacagacagccaggctattcgtgacgtacttctgttcccgacaatgaagtccctggacgctgataagaaagcttccaagacttccgaagcagctccggcagctgcagaagtgaaagctgagcctgaaaagattgatttttctaaggtaaagattgagcctttgtttgaggaagcagttgattttgacacattcagcaagtcagatttccgtgcagtaaaggttaaagagtgtgttgcagtaccgaagtcaaagaaactgttacagtttacgcttgatgacggaacaggcacagacagaaccattttaagcggtattcacgcttattatgagcctgaagaactggttggaaagacgcttatcgctatcacaaatcttccaccgagagctatgatgggcattgactcttgcggtatgctcctcagtgctatccacgaagaagaaggcgaagaaaagctccatcttctgatggttgatgaccatattccagcaggtgcaaagctctattaagatgatgtaaagatgtaccgttttaccgaatagacgggacgtacttcatttgataaaaaactaaaaaaacagcgatttgcatcaaacttatatcaattgatgcagaaatcggtgcaagcaagaaaaaatcgcataattagtgcaatgagtgggcaattccaatcggagttgcccattttttaaacaaacaaaaatacatatcgaaatttacaggagaaatatatatgtttggaagaatttatcatgtaggactaacggtttctgatttggaacgctcaattgcattctacagagatgtccttgggcttgagtttcaaggagagatttttatggaaggcgaagaaacagataaaatgtttcgtagagtaaattgcaaagcaagggtcgcttatttgaatggctccaaggctgttgaagcaccgccagttgagctgattcagtttgtaaacaacgaagtaaagaaagttccctctgatttgtttacaacatctatctcggaagtatgtttctacacagatgatattgattctgcttacaaacatctcgtagataataatgtggagtgcttgtctgaaccgcagtatttcgattttagagcagatggatttggggaaagtagagctttttattttagagacccggatggaatcattcttgagctgatgcagccgctttaatgaaaaatggtaagtacaggaaagcggcaactttcagtttgtcaggttgccctttgagagaggagaaatccttttctcaaagggctttttctatttatacggatattcgcaaactacaagacaaagctaaaacttcatatactctaagcacaaggaggttgaggtttggctatgaataacagtttagcagaagtacatccggaacttgtttcggagtggtcggagaaaaacttaccgcttgggcaaatatgaaaagagggctgaagaataatacctttgaaaattacaaatatatgtacaatacttttgtgcgaccagtgattggaagtaaaagaatatcaacgctgaagaaatcggatattaagaaatactacaattatcttgttgatgaaagaaatttgaagccttcaacgattgataatatacatacggttcttcatcaggttttacagattgctgtcgatgatgactttatcagaaataacccgtcagataatgtgttgagagaattgaaaaaagcacattgttttcagtcggaaaagcgtagagcgttgacgaaaccggagcaggagctatttctgaatttcctgaaaacccaccctgtatatgaacactggtatccggtctttgcagtaatgataggaactggacttcgtgtgggggaagtaactggattgagatggtgtgatattgatatggaaagtggaatgattgatgttaatcatactcttgtatattatgaccacagaaccgagggaagtaaaagtggctgttatttcaatgtaaatacagcgaagactccggcgagtatgaggcaggttccaatgctcggttttgtgaaagaagcatttgaacatgagaaacagaagcaggaatatttaggacttcattgcgagttcacgattgacggatatacagattttattttcatcaatcgttttggtcaggcacagcaccaagccacactcaacaaagcaatccgaagaattatccgtgattgcaatgatgagcagtttttgcacagtgatgaacctgatgtgttacttcctcattttagctgccactcgcttagacatacatttacaacaagaatgtgtgaagctggagtaaatataaaggtcattcaagacgcactcggacattcagatatttcaactacactgaacatctatgctgatgttacaaaagaaatgaaagcggaagagttcaaaggattggatagctacttcaaagtataatattggacttcacatacagaaagagaacatacagagtgttgtgtgttctttttttcgttggataaaaagagaaatgcttgaatgggatatctttatgtatctttaaacgcccaaattagaaatattactcttcttcactcttcttcaacttcgaataataactatccgcagtataaagcgccgccaccggattatgccccaatacacggtctttcgtcactgctgtcgtagtcagtgcctcggaatatttgtaaaacagactgtcatgccccacacaaagtccgaccacaacattcaggtccgtcttcgccttgttcagaagctttgcctgcaggatcggattacacatattcacaccgacaccttcgcagcattccgggatgccgaccgatgtcttcttctgtgttccggctttacagccgacaccatacacctcaaagccatgtctgcgcaggatatctgccaggatacggctttctttcaacaatccgacacaggttgcgatcccgatctttttcgcattaatcttctttgcaaaatccatgatttcttcgacacgggtatgtttgcagtaattctcatactctacttcagctgcagcgattgttactttgcggttctcgtcttcattgtagcattccatagcttcatttagaacttcttcatccatgtgtgttgtcagacagaaatccggataggctttatccattttgctgcagttttttactgcgcagtcgatacaggacatggcttcttttttcattttttcactctccttttgtataccttggtatctacagaggcctgccactggcagattctctagattaagctttactttgtaaaatatcctctatttacttcatagtaacaaatacttatactacagacaatggttttccgtttttattttcttattttttgtagttcttttctatgagaaacgttccccgattcagggttgatttgtcatgaattgtcgattctgatttttgaaaaattattgaaaattatctttttaaacttgaagatatataacagtctctctgatagaccatcatctttggatttatattatcatgtataggttatttcgtcaatcaaaacatttatccacttccctcatttcaatcctagctctttcaatacctcagccgaatactagctacatggaagccaataaaccatgcaacggcggttcttttattcgccagtatatgcaatttctatctcatagccgccgttctcatagtaggcgtgggaaaaatagtatcttattgttatttctgaaatataaaatttgaatcataaaacttctttcccgggagtttgacacattgaaatcaaaaaaagtactgcaaagccttgaaataggcttatttttttgtcaaatttttatttttattatatagtaatatttagtgatatatggtataatagtgacagaggtgattattgtgcgcataacaacatcaaaatcaaaaaattccgagtccttttatatcactcagtcctatacaaatgccgaaggaaaaagtacttcaaaaaccatccgaaagctaggtacgttagctgaattatcagaacagctccatacagatcgtgacggagttgttgaatgggcgaatgaacaggctcgtcttgaaacactgaagtataaaagcgaaaaagaggatgctactgtcatgatcccttttcattccaacagactcctggactataataagcagaaacttttctctggtggatatctttttcttcaatcgatttactatggtctgaaacttgattctatctgccgaaaaatcaaaagcaggtataaattcgagtatgatcttaatgcgattttgtctgatttaatttatacaagggttctggaaccttccagcaaaagttcttccttccaaactgcaaaacagttccttgaacctcctacttacgaacttcatgatgtgtaccgagccctttctgttcttgcttttgaaatggattttattcaatcagaagtttataaaaacagcttttttctcggcgacagaatggatcggattctttattatgattgcacaaactactactttgaaattgaacaggaagatggcgataaaaaatacggaaaaagcaaggagcaccgtccgaatcccattattcaaatgggactttttacagatggtgacgggatcccactggctttctcgctctttcccggaaatcaaaatgagcagaaatccttaaaacctttagaaacaaagattctccagcaattcggctgtgataagtttatatattgcagtgatgccggacttgcttctgaagataaccgtgtccttaatcacatgggacaacgggcattcatcgtcactcagtccatcaaaaaactgcctgttgaagaccggacatgggctttaaacaaaactggattcaaatgtctcgcagatgataaacctgttgatctcaaaaaactgacagatgatgataagaaccaactttattataaagatgaaccgtttacgacaaaaaaactggatcaaagattgatcataacctactcccctaaatatgccgcttatcagaaagctatccgtgcagagcagatttgtcgggcagaaaaaatggttgcaaatggctctctaaaaaaacaacgtaaaaatccaaatgatcctgcaagatttgtaaataaggtagctgtaaccgctgaaggagaaaaagctaaaatccactattatctcgatacggataagattgctgaagaagaaatgtatgatggtctttatgcggtatgtacagacctgcttgatgatgacgttgcagatatcttgaaagtcagcgaagggagatggcagattgaagattgtttcagaactatgaaaacagactttgaagccagacccgtttacttaaaccgtgaagaccggatcaaagcccatttccttacctgttttcttgctttgttacattttcggttattaaaccgtgccctaaaaggaacttatactacagaacaattacttcatactttaaaggagataaaatttgcagatgtagaagaacagggtttcatgccggtatatgaacgccagggactcaccgatgatctccatgaaacctgtggattcagaactgactatcaattcataacaaaacgaaaaatgaaaggaattcagaaaaaaagtaaacgaagataaaacattactatatttcgtgtatgcaagaaaaagtgccacaccccttgtatttacagggattgtggcacttttttaactaatcaactgtcaaagatgagatattatcatgtataggttatttcgtcaatcaaaacatttatccacttccctcatttcaatcctagctctttcaatacctcagccgaatactagctacatggaagccaataaaccatgcaacggcggttcttttattcgccagtatatgcaatttctatctcatagccgccgttctcatagtaggcgtgggaaaaatagtatcttattgttatttctgaaatataaaatttgaatcataaaacttctttccctctcaaatccatttttaccaaaccaactactaacaatccaataaaaattgccgtgtccacaaataacagtacaacaacactttttaccactccgaaagtaaaaagtatggagaagatttccactgacaacacaataaaacacatataatttgtcaaatactctgttataatttctccataataattgttcatctgcaatttcgcatagataaaaggttttaataaataacggattatgatacatataacaggacaaataaaaatccagtttttattaactagggatgttgccactcctttactccattgtactggaatttctgtcggcaacttagaataagacaaagccccaataatcaagcatagtgcggtaatcatagtccaggtaagcatacttccccatatatacaaaaagctgacggaatccagtttgaaaacagttcgattatctttccaatagtcatgcaaatctgttacatattgttctacctgtaatttttcataactaatactttcttcatccagcattttttcgcacatgagtttcgccttattcaaatcagtaatctgattttttaatacttccttttgcttctcaagcatttcctgcaatgttactttttcggatataatacttcgtatatcttcaatagaaattcccaatgtacgtagatatgcaatcttctttatattttccacatcattttcagaataatctctataaccattactttcatttctcgaaggctcaataagtttttccttttcataaaaacggatattagaacgggataaacctgttcgctcttctacgtcttttatagtcatattatgccctcctttcgagcaactctattttacttaataataagctataaacaaggtttacagtcaagcatttatcaaaaaactatagttgttgataaggacatgaaaagctgtccaaaatagaaggtgaaccggattgctgctccgactcaatcttccacgtggaatacatcttccaccagcatattaaagtattttgatatccgcagcataaattcggcagatggggtgctgtcctcacgttctatcctgccaacagttttggtgctgtatccgatagcagcggcaaggtcatcctggtaaatgccacgctgttcccggatttctctgatattattggtaaccgccataaaaatcccttctttcagttctatagatattttcttattgtcaattatgcaaaataatgtgtccaataaaaaggacttgcaattttatcggcaatgctttatcggcaatgtcctgtaatagcagaagcatcagattttccaagaacttttccaaatatgtctaagcggtcattttcactaaccttgataggtgcatacttttcattaagagagataaggaaaattccgtctttatcgttttgtaatttcttaatataggcttctccgttaagagcgaagatgccgatttctccattagcaacagattcctgttgtaatacccatgcaatctgaccatcatggaattcaggttccatactgtcaccactaatacggacaccgaaagtagtatcttccggcaggatagattcatctatgcgtacagtctctttcggtccgtctacaaggaagttaccggttccggctgatacggcattttcaaaaatatcaatgctacggaatggaattatcttagcagtctgcttttcatacattccggatgcgtggagcagattgatataatccatagcttttgcggtatgctcctcagtgctattcatgaagaagaaggcgaagaaaagcttcatcttctgatggttgataaccatattccggcaggtgctaagctgtactaaaattaaatataaaatctctaaaaccatgatgtcagaccacagttgacaacaatttgacaacaaaatttgggataataatgaatcgttatgaagcatgacgaatttcaggtgaaaggacacaggtttgagaatgaaatcaaaattgattcactggatcaatgattgatatgcatgacaacaagagcacttcttagagttaatctgagaggtgcttttttttcgcactaaaaaatatatcccggcagtcaacttctgtaaaacagtgaattacgcgaaaatatcatggataaaaattataaaccaatcacaagtatgaaggaagtattggagcagcttagaaaattgcgccgacagtatctgcgttatcaacaggcagagattatttacagtatttctcataagaaattatttgaacttgccagtgatgcaggtgcgatttacagaatagatggaaccgtattgatcaaccgggatatttttgatgcctatctggaacaattccatgaactggcgacaggaaaggataaggtggtgtatgggatatgcacgtaaagatgtagagaaaacaaagaaaatggcaaagaaatttgtacgctatcaggaaggggcagagctttacagcattggactgaagttcctctcagattccatgaaatgcccggtattcccggtacatttcaatcatatttttttttgcatttttcaaataagaagtatcggcgctgattcgtccaagaagaaaatatccctgatagatagaaagcatgcgctgcgaaagaatttttgcatgatctggagacaatccggagcataacaatacttcctgaaaaatctgctcaaattttttcagtccttccataaatacagatgcaactgcaggcttgctaagtgctgtttccatgcccatcaccgcatacgggcagcctgcaaatgtttgtccatttgtcctttcagataaaaaatcaaagatttcttcaataaaactttcccagtcatttccctgagaactattttgaaattgttccagtaagattttttgatagtattccgttaccgctgttgccaggtcatccttgcttttgaaataaaaataaaaagatccttttggaaggtctgtttgtttgagaatttcgctgattccagtagcagaatacccatttttccaaaataattcagcagcacactcgatcaggcgttgtctggattcttcaccttttttcaattcgcatttcctccttcagtctggaaaacagatgtgtaagtgcaaacataagcgtttcataatgcatgtaatctaaagtattcctatctgcaagaatttgaagacttgccgggaactcgtcatcagcttcccagaaacggatgataatcggcaaaaaaggaaaaagatttaatttaaaagcaacatctcctttttccagttcctttccggaaagtgatatacaggcattacgcaatgcaacggtttttccgttaaaaaagtcagcggtattctgaaaaaatcctctgttcggtgagagatttcctgttcggacagaggaaaggctgtttatatttacaaattcatgtgacagatggcatctatcctttgaataacataaaacatcataaatggtcattgcttcattatgattggcttcatgaactgtttcaaaatcattatctgaccactgaacacttcccgtttttcggttaatacgataggtacggttaataaaagtaatatataaccagtcagaattgtaatctaatgaatatttatgtatcattgtagcctgatcatattgcaggaaaacatgtgccattgaaatttttgttttatcataattattgatagctttcgtcatatatttctccaagaatatttttgttgtagttatttacaaaatagactaatcggtctataaagtcaatacattttgcgtaacaaataaaaattaatgatcatgaaaagtaaatgactaagacttcccataccttctgatgacagatgacagaatcccggcagtcaactactgcaaaacagtatataacagttgacaacagtattacactgttatatactgtttgcaacaggagggacatatgaagattataatcaataatacatcgatggtaccaatttatgagcagatcatggagcagatcaaggcgcagatcatctccggagagttaaaagaaaatgatatattgccgtccgtgagaacaatggcaaaggaactgaagatcagtgcacttactgtgaagaaagcatatgacaatctggaagcagagggcatgacagtcacagttcatgggaaaggaacgtatgtagcggcttcgaatacacagctgatggaagaagagcgcaggaaagaggttgaggcggatctggaagcagcaattcagaagggaaggcgctgcggaatgaaggaggaagagatccgttcgttgtttgaactcatcatggaggatgaatgattatgttggagattaaaggagtaaagaaaagctacggtgaatttcagttagactgttcgttaaatgtagaaaaaggaagaatcaccggtctggttggagagaacggagccggtaagagtactttgttcaaggcagtgctcggactcatttcttatgatgccggtgagataaagatcctgggaaaaataccggaagagttaagtgaaaaagagaaagaagagctgggagttgtcctggcagaaaccggattcagtggatacttgaaagggaaagatgttgaggcagtccttgccaaattgtatccaaagtttgaagcagaaaaatttcatcagatgtgtgaagaatatcagattccgttggataaatttataaaagagtactcaacaggaatgaaagcaaagctgaatctgatcattgcattgacacatcaggcagaatttctgatgctggatgagccgacagcagggcttgatgtcggagcgagggaaaggatgctggatattttaagagagtatatggaagaagaaccggagagaagtatcctgatcagttcacatatttcttcggacttagaacatctgtgtgatgacatttatgtgatacataaaggaaagattgtacttcatgaagcgatggatacgattcttgaaaaatatgcagtgttgaaggtcagtgaggaacaatatcaggcagtggataaaaggtatcttttgaaagagaaaaaagagttttttggagttgcctgtctgacgaacgagaagcagtattatatagaaaattatccggaaatcgtagtagagagcggatcactcgatcaggtgatcctgatgttgacagggggcgaaagatgatgaaaggaatcagagggcttttggaaaaggattttcgattgttttttcgacagggtggtaatctttttttggtgttagtgtttgtagcattgttttttatacttacaggaaaaacggcagctgctttcattgcaatgtatatcccatctgttctggcgatatattcaggtaatacgatcagttatgatgaaaatggccatggttacacatatttattttctttacccgtaaataaaaaaatatatgtcagagaaaaatatattttttcctttatcatgacagcatgtggatggtgcattggaatgatctgtgcaggaattatggtactcataaatcctgaagaggtgtttgatctggaaatgctggcaatggagttgatcacattttttgtgtttcaggcaattgcgggaattatgatcgcgatcaggataaggttcgaaggagagaaagggcgaattgtgctgccaatcgcaattttaattatttttgcgatttgttatacaattagatcttttgtgaagactaacttgggattaaaagaaagtattctgcatatgatagggggaataggggattttgaaatcgggattgccctcattgtgctaagtctgcttatatggtttgcttcgtataagtatagtatgagcgctatgaagaagaaagagttttaagataggtgtggcaaaaatgatccattaaaaataatgattataaagatgtaatagctaccaaaaatatgagaaaaactttgtgaaaaaatagtcttgtgtttcgtaagagtcccttgtaaaatagcggacaaggatgaaaagaaaaggagatttttatgggaaccaatgaaaaagatatgactgccggatctcccggaaaactgatcataacttttgccataccaatgatgcttggaaatatttttcagcagttttatacaatggcagacaccatgatcgtcggacaagtggtaggagttaaggcactggcggcagtaggtgccggagattggctggtatggctggtgttggggatcatgacaggtatcacacagggtttttctattcttgtatctcagtattatggagcaagagaaaaggaaaatctgaaatgtgcagtagcgaaaagctatatcatgacagcattactgtctgtggtcgtactcgcagtaagtgaaggtacagtttatcatgttcttttatttttacagacaccggataatgtcattgatctgacaatgctatatttgcggctgatttttgcgggaatcccgatcatagctgcttataatatatttgcagcgatccttcgggcacttggaaacagcagatctccgttgatcgcaatgacagtggcagcagtgatcaatgtgggactggatctgttatttgtggcggtttttggctggggtatagccggagcagcagtggcaaccgttatcgcacagggattttcagccttgtactgtttgatcgtattacgtaaaatcccggatatccgcctggaaaagaaggacttttacaggcaaccctctatgagcctgcggcttttggaactggcggttcctcttgcgatacagaatgtgatcatctccgtgggaggacttgtggtacagtatgtgatcaatggatttggttttctgtttgtggcgggatttacggcatcgaacaagctgtatggggttttggagatggctgccgtttcatatggatatgctattacaacctatgtgggccagaatcttggtgcaaaaaaataccagaggattcgaaaaggcgtgcgcagcggcacttatatggcagtgctcacttcggctttcatttccggcatgatggtactgtttggacgtaatgtactgtccctgtttgtatccggtgaaccggatcagacccgacaggtattggatatagcatataagtatttgtttatcatggctgtctttttgtgggtgctgtatctgctgtatgtgtatcgttccgctatccagggcctgggtaatactttgattccgcttgccagcggcattgcagaatttatcatgcgtgtcagtgttgcgctgctgctgccaaaactgatcggtgaagatggaatatactatgcagagatctgtgcatggagcagtgcagctgttttattattcgtaagttatatgatcattatacggaaatataaagaagtcaccgttcatacataatgttatttacttaagggatctataataatacaggcagaaaatatccgggtttcactatgaaatgttcagatattttatatttgacaaaaaactatttatataaaaagaaaagtatgatattataatatttattcattgcaactatgaaaattgaatagtcagaagggtgtacaaagtacttaataaggaatctggtgaaatgccagaacagccaccgctactgtgacagggacgaaaaccaaaatatcactggagagatccgggaagatggtaagtaggaagaactggagtcaggagacttgcctttttgacagaagaattctgattcggatgggatacagaaggaataagctctgcctgaggtggaggtttgttttttgtgctgatatgatgctggatcatatcagctttttttattttaaaaacaataaacagataaaaaatgaggagagatgaagatgggaaaagtaattgcaaagcgttttatatttatgattccggtagtgctggcggttacatttattatttttatgctgagttttatatcggcaggtgatgctgccagagtgctggcggagaaaaaatatgagcatccgtcaccggagcaggtagaagaagtacggcatgaggaaggactggatcagccggtgctggtacaatacgggaaatggctggatcaggcacttcatggcgattttggaaaatcatattctaccagaaaaccggcttttgaggaattaaaaagatattttccacagacatttaaactggcagttacttcgtttttattgttgatgatcgtatcagtccctcttggaattttgtcggcaatttatgaaaacagagttctggataaagtcattcgcattttgtcgtccctcagtgtatctatgccatctttctggatcggtctgatgctgctctatatatttggagtaaagctaaaagtgatttccgtgatcggaggagatgccggaggcatcccgattcttgcggcatttgccatggatatcagtttctttggaattatgacgagattgatccgtaccaatatgatacaggtgctgaagcaggattacatacgtgccagcagagctaagggattgtcatctgtaaatgtaattttgcgtcatggtctgaaaaatatcctgattcctgtgctgacacgtctggtatcaattgtgatcggttttttctgtggctcagctgtgatagaaagtattttttcaattcagggaatcggaaatctggcattgaaatccgtgatctcaaaagacactccggtgctgcaatgttttatctttattctggctgttggcattgtagtattaaattttcttgtggatatcgcctattctgcgattgaccggcgaatccagttaaagtaaaggagagatcatagaatgggaagcagaagaaagcagaaaacagaaaaaagcatgatccagaatctgtactggaaacaagtattccggtcaccgaaaacaaaaataggattgatggtggtcataatttttgcattggcagctatttttgcacctgtattagcgccgcatgatccactgcttgtggatgtttcgataaaattaaagaatccgtcggcggcatatcctttaggtactgatcagctgggacgatgtattttatcaagacttctctggggcagccggtattcactgagctatagctttacggtgcttctgattactgtatgtgtcggggtgccgatcggactgtttgccggatatgtaggtggaaaaatcgattccataattatgaggatcattgatgtatttatggctatgccggtctttattgtggcacttgccattgcaggaaccgtaggagccagcggcgctcatctgattctgtccttatcggtcgtatcctgggcagaatatgcaaggcttgcccgagcattgacacttcaggaaaaaaataaaaattatatgaccgcactaaaagccggcggctgcggccacgcaaggatcatatttaggcatgtattgagaaatatcctgccatctgtgatcgcactggcaacaatggaaatcggttcgatcattctgtcaattgccggtttttcctttatcggccttggtgtgcaggcaccgacaccggaatgggggatcatgctcagtgacagtagaagttatatccagacttatccaagactgatgttttatccgggcatactgatcatgatcattgttctggcatttaattatctgggggagggaatacagaatggaacagcccaaaaatgatgtcctaagggtaaaaagactacatgtggagtttcagacatctcacggaatggttcatgcagtaaaagatgtcagcctggaagtaaaacgcggaaggatccatgctctggtgggagaaagtggaagcggcaagtcagttacctctctgacgatcatgaatctgcttgcaggaaatggaaaggtgatatccggagatgtgacactgaacgaaaagagtcttctgaagttatcaggaaaagaaaaacgacagttatacggagacaggatcggaatgatctttcaggatccgactgctgctcttgatccgctttttacagttgaacaactgcttctggaaggactgagaaaacatcgcagaatgagcaaaaaacaggcaagggaagcagcgttggaaagtctgcggatgatgaatctgcgtgatccggaagaactgatgaagaaaaaaccttacgaattgtctggtggtatgtgccaacgtgttatgatcgccattgccatgtccatgaaaccggattatctgatcgcagatgagccgacgacagccttggatgtaaccgtacagaagcagatcctggaagaaatctatcagctatccaggaaagaaaatctgggcgtgttatttattacgcatgatctgggtgtggtggcagagatcgcggatgatgtttcgatcatgaaagacggcgaaatagtggaaaacggaacggttgaagagatcttttatcatccgcagcattcatatacaaaaaaactgttggatgcagttttataggggaaaagtatgagtacgttactaaagacagaacatttaaaaaaatattatggcaagaaaaaaattgtgaaggcagtggatgatgtaagtctggaaatccatgcaggatcatccatggccctgatcggtgaaagtggaagtggtaaaactacattcggaaagctgatcgccggcctggagaaacctacagatggaaaattctggtttcagggacaggaaatgcaggatttgtctgaaaagcagtttcgtccatatcgcaagaatcttcagatggtctttcaaagcagcagcggggtatttgatcccggttataccattggagaaaatattctggaaattttgaaattacatgaaaaactgcaagagggtgagtatgaagagcgagtaaaggaggctttgatccagacggggcttgatccggatatccgcaaccgttatgttggacagatttcaggaggtcagtgtcagagagctaatattgcgagggcgttggtattaagaccggagcttgtgatctgtgatgaaccggtatccagtctggattattccatacgaaagcagatcctgcatctgttaaatgagctgcaggaaaaatatgagatgacttatttactgatcactcacgatctgtccaacgttccatatctctgcaaagaggtggctattatgtatcagggacgcgtggtcgagtttatcgatcatacggacagcttaaaggagactgccgtacatccttatacaaaagatctgtttgattccattccggtaaaagaaccgaaaatgcgaagaatcggatcacaggaaaagaaaatattttcagataccattccggaacagggctgcccatatcagaaccggtgcagaagatgtacaaatatatgcagagagcatataccggaattgacagaaattgaaacaggacattttgcggcatgtcatatgctgtaaaatataaaacaaacaaaggagaggaagaaatgaagaaaagacgtgtagcaaaattgatagcattgagcatggtggcggcaactttactgacaggtgtcaatgtacaggcaaaagaggaaaaagtagttacggcaatgacatccattgatctgactcctgaactttgtgaccctataaaaagtggtccggactttcgtctttatgaaatgatctatgatccactggtgcgttatggagaaaatggagaaattaaaccggcattggcagaatcttgggatatcagtaaagatggcacaacctatacgtttcatttaagaaaagatgtgaaattctcagacggtacagtgtttaatgcagacaatgtgatgtggaattataacagatgggtggaacaggatgtgaccggtaacttttcagccaaactggaaaatgttacaaaggtagatgattatactgtagaatttaagttcgcagaaccatgctatacactgctgatcgaattcagctatccaagaccattccgtttcacctgtgaaagtgcactggatgaagacggagaattttgtcaggaagtgggtaccggaatgtggatgatcgacagttatgaaagcggtcaggaggttgtcctggtaccaaatcctaattattacggtgagaaaccaaatattgataaagtagttctgaaacaggtggtagacggtgatgccagagtgatggcacttcagagtggagaggcagatctgaatcttcaggatattccatccgaaagcttcagtattatccaggcagataaaaatttatcgacagaacagcaggtttccacactttcttactatctgattgaaaattatgatacaccggcgcttcaggatataaacgtacgtcaggcactgaattatgcaacaaataaagaaagcattgtaaatgatctgctggatggttacggcaatccggcaaccggacttatgtctccgacagttccttatgtaacagaagaaaacagcaagggctatccatatgatccggataaagcaaaggaactgttaaaggaagcaggatatgaggatacagatggagatggtattgtagaaaaagacggagaaccactgagcctcagattggtattccagactgaagaatatgcttcatggaaatctctttgtgaattcctgaaatctgaatatgagaaggtcggtgtaggtattgaactggtagaaaaagaatccgcggcttactatgatgagatctggaacaccagagattacgatctgtgcatttaccgcagctatgaagattcctggatgcctcatggattcctgaaatcaatgttctatgcggaagatggagcaaaggcagtaaactggtacgatgaggagctgaacaaagatctcggagaagtattaaagacacaggatgaagaaaagcggacggaattatacgataagatcctcacacgtatcaatgatcaggcagtaacagtgccgctgtattatccgaaccgtgattatatctataacaataccagactgaccaatgtagagcttgcaccgactgcctatgaaggcattaactgggcaacactggatgtagtggagtaaaaaatgtttgaaaagatcgagaataaatggacagaagattccggcgattatgatgatatgatccaaaaacaattgagtaacaaaagaacggtatctcactggacaaaagaattgaaaagacttcttggacctgagccccttcgtattttagaagtgggctgcggcccgggttttatgagcatcatagcagcgcgtctgggacatgatgtaaaagcgatcgatggttcatcaggaatggtagaaaaagccagaaggaatatgcgacagtatcatcagcaggtggaaatctgtgaggaagatggtgtaactttgccattggaacaggaacaaagctatgatgtgatactttccagagatgcggtgtggacattatatgatccggaaaaagctttcagacgctggaaggctgtattaaaaccaggtggaaggatcatttattttgatggggactatcggaccgtcgaacccacattaaaaaataagatccatatgaaaattgctgattttcttatttatgttacagaaagaaaaacatatggatctgacgtgaaggaaaacagcggaatttatgaaaagctgccatttacatcgcagaagcgtccggaagcggactttcagatattaaaaaaggtacgctttgccaggatccagatcagagagaaccgctggctaaacagaccatggacgatggatttctggaaatacggatatcagggaaaaaaatttattgtagtagccacaaagaaggagaagtgacatgcaaaacgataagatcaaagagtactgggaaggagaagctggcatttacagcgaagggatcaaggcagaattgaaaagtgaaacagcagaaaactggaagaatctgattctggagtatgcgccggaaaaagaacatctggaagtactggacgtaggctgcgggccgggattttttgaaattatgctgggaaaagaaggacatcatgtgaccgggatcgatattactgaaaatatgatccatgaagcaaaggaaaatgtaaaggcagcaggtttatccgcagatttgatgactatggactgccacaatctgaatttcccggatgagacatttgatatggttatctgcagaaatatcacatggacgctggacgatccacagaaggcttacaaggagtggctgcgtgtactgaaaaaaggcggacgtcttttggtatcggacgcctgctggtatctgcatctttatgatgaagaaaagaaaaagatttacgaggcacatgatgctgctatgtgggaaaaatatggaagaggtatccatgctcatgaagatgcggaaacagggaaagagctcagcagtaagctgtttatgagtgataaaaagcgtccggtatgggatctggattacatgatggagatcggcttttccaaagtgtttgccctgaaggacatcagtgatatttccagaacttccatggaacgtgagctgaataagctgacacctcagtttttagtgggtggagaaaaataagcggaccggcgttaaataaaacgctggacccgctccattgtggtttttagaataaagatatccgtcagtacatcaccggtttccagagaatggttggcgttttgggtgagaaagagaggtacatctttctgcgctgccagttcccgtatggaattggtttcggcccagggatctgcggtgccgtggaaggcgatgcttccggcaagtgggaaggaaaaggtctctgcaagaggcgtgaacaggatgctttttacagtcagattgtgtcgggaagcataggcagaggagatgactgtaccaatgcttttggaaataaacagaatgctgccataggaattccagtcgatgctgcctaaggagcgttctgtttgttccagggcaaggtcaaaggcctgtttcattttcttcggatcaccttttacattttccgggaggttgtcataggataccgtgcggatctggtagccttgtttgctggcaaggcggctggtatagtacagaagcggcttgtcggcagtgtatccgatgcccggaaaaacaactgctaatttcggggcatttttatctgctccgactgtatgagcggaaacttttgtatagagcatctgcagctgaagcttttcctgaagttcctttaaggtaatggagatcgtacaggaatcggatggaagataatcataatcggtaacaatgtcgtcctcttccatggaataaacaatgtgtgaggaacccatgagctccatgtcttcttcaatatcggaaagtaattcttcgtatgatttcattttaattcaaaccttcttatttaaaaaatcgtttatttttacagattcttctattatactggattcattgaatgacagcaagaggttactgttcactggcaatgtcccgcgaggtgtttttgtgagagaagttaaaccttgcttttatcctgcctgcacgatatactaatataatacatatctgattaatggagggttttacaaatgaaaattgcagcaacatacgataatggaaacatttttcagcactttggaaaaacggagtttttcaaggtgtacgaggtggaggataacaaggttatttccagtgaagtgatcagttccaatggtaccggacatggtgcacttgccggacttcttgcagatcagggaatcagcgttctgatctgtggcggaatcggcggcggagcacagagtgcacttgctgaggctggtgttgagttatgttccggagcacagggtgacgtagatgcagctgtggatgcttatctgaagggcgagctggtatccacaggtgtgaattgtgatcatcaccatcatgaggatggacattcctgcggaagccatgaggatggacactcctgcggcggtcatgaagacggacattcctgcggaggctgtggcggaggatgtggttcccagccatctatcacaggtcctaatgtcggaaaaacctgccgtacacattacagaggaacctttaatgacggaacacagttcgattcttcctatgaccgtggcgagccactggaattcatctgcggagcaggccagatgatcaaaggctttgatgcggcagttgcaaacatggaggttggccaggtggtagatgttcatctgatgcctgaggaagcttacggtatgccgaatccggatgcgatttttacacttgagatcgaacagcttccgggtgctgaggatcttactgtaggacagcaggtatacctctccaatcagtatggtcagccgttcccggttaaagttaacgcaaaagatgaaaaaactattactttcgatgctaatcatgagatggcaggtaaagagctgaatttcagaattgaattagtagaagtgaaataagcaggaacagtgggaggtgctgtatgggagcatatggcatctccttttttgtctgaagggaggaagctttcctgatgaggatcgctatgataccatttggattactatccggttttatggacagcaaagaaatccggatcacagagctgggtgaagatggatttcgatttcggctggcagaggaatgcccggaaccggagcagtttctgatctgtttttatgatatgaaaaaagccggatacaggagagtggagatccggaggtttgggatgagtgcagcagaggagcaatgcctgcagaatcaacagccagttgaaaagaaaatcggaaaatatttttacagggaatattctgtgagagtggaacagaaggattatgtacaggaggttcggcgtctggccggagagtacaaccgatatatccgtctgaagctggatggagacgatggagagctggcgaaatcactgacaggttatccttcggagctggatgagatgcactgcaggagtctggaggaacagaagaagcggtggttttttagagaaaatgaaaaggcttctggaaatccacaggatacaatgggtgcagaagaattaaggcttttggataatgcagagtttgccctggaattaaactgcacttccctgtatgaagaatatctgtgccagccgctgcaggcttttctggcgtcttactggcagaagaattatctcactcacagttattttgcaggccggataccggacagattttatattggaaatcagttctgccataatctgtttccgacagaagagcagcttttttctatcatggataaaatgtattcggagggctcggagatcacactggtattttcttatatccgggaatttatgcttttgtctgtgggaaagcttctggaaaaggtggataactggtgctgtattcatggggtgaatgtggaaatcgtagtcaatgactgggccatggtggaaatgctctgtggaaaaacatcccgcctgcatcctgttctgggcacattgcttaataaacgaaaaaaggatccgcgaatgaaatataaatccggtgataccttattatttcagcaaaacagcctgaatgcggggttttatcgggattttctggctgaagaatttcatatccacagatacgagtgggagtcctgtggatatccacaggagcttcccccgggaaaaaacagtctgcatctgcctttttatcagacaaacacttcgcagtattgtccattgtatgctttgtgcaccactggggatcgcggtacacagcagcttgcggagcactgtccgaaattctgtgaaaaatacgcactgctttatccggaacatttacacatggcagggcggtataactccctgtttggtgtggataaaacacttccggagtcaacggaaatgtggaaaaatataaaaggcacaaagccggatcgcattgttgttaatatatgacaggtgatgagcaggcttcgaaggtggatcgcgaatatccgtttgacaagaatacattgcggaaaaaaggaacaggacatggagaacagtatgaaaataacagccgggttaggctccatagatgaatatgaacgttttgtgcaggcaggagcagatgaatttttctgtggctatgtacccttttcctgggcggaaaaatacggcacagtaatgccgttaaatcgcagggaggttctctgctgtaatgttcagcttggagcatacagtgagctggaaattctttcccggatggtgaaaaaatataaaaagccggtgcatctcaccttcaattccctgtattatcttccggaacagtatccggagatcggagatatcatagaaaagtgcatgggaattggatttcgaagctatatcattgcagatccggcgcttcttgtttatctgaaaaacagggggatttcctgtgagatccatctcagcggagagacaggggaagtgaacagcgaaatgctgaagatgttccggcgctttcctctgaagagattgatctttcatcggaaaaacacgttccgggatatgcagtctgttattgcatctcagagagaagtggaaaaacaggccgggatccgaccggaggcgggaatggagttcgaggcctttgtgctgaatgaaatgtgtcagtttacgggagcattctgtaattctcttcactgtgatgagatgggatatctttgcagggtgtcctattggcttggaactgtacggaatggtgatgctgttccggaaaaaataatggctcttcaggagcaggcgtgggatcaggaaccggatctgaaagcatatgatgaatccggatatctttgtggtgagacaggctgtggactgtgtgcactgtatcagctgaagcaggcagggatcacgcacctgaagctggttggccggggaaactatgtggatcacatggaaaaagatatccggaatttgcgaaaagcgttggaaatcctggacgctgcagaaaatgagagggaatttaaatatacgttaaaacggacagtgtttccggcggggtgtagcgaaagatgttattatcagtaacaaaaagagaagcttttttgagttggaataaatgataaatgggatgaaaaccagaatcaggaaaagacatggtgcagattgcagatttgacggtcctgggaaaaagctatttccggattatttgggatcaatggcgtgtgtccttcctgagttcagagatcattacatttgctgtgatcctgatactggcgagatccgggcggaaaaagaatgtattttcaggagaaaggatataaaatgaatttcgagcgtgtaaaaagagaagaagcagatacagttctgaagctgtaccgttcattgctggggacgccctattgtgtgtggacagaggagtatccttcagaaaaagaagtggaatttgatctttccagagatgcgctgttctgtatgcgggacgatgcgggaaatatcgcaggtgtgatctccattgatgatgatccaaatgtggaatgtctcacatgctggtcagaaaccatggtgccgtcagcggaggtctcccgggtgggagtatgtcaggaattccagaatcaggggattgccgggaaacttcttaagggtgtgatggaagagctgaagaagcggggctataaagctgtacatcttcttgttgcgaaggacaatgtaaaagcactccgttcttatgataagctgaattttgagaacgtgggagagtgtgaactctggggacatatgtactggtgttatgagaaagcattataaaaagtattataaaaaatgaaaaacagatatctttttgccgggcggtagatcgaccaccaatgtcagatcgataagtggtggtcaatacacagtcagcagagaagatacctgttttttgtttgaaagcagatcagatcctccggcagctgttcctttcgatcagctggtgaggtacaatgatctttgtggccggaaggctcggattttcgatatgactgatcatctgcgtggctgcttccattccaagctgcccggagttaatatcaatggaggtcagctgaggcgaagtcagtctggcaaaaagtgagttgttaaaggaaagaatggacagatcctccggtatggagatatctgcttctatacagatccgctccagggaaagtgccagaatatcatcactgacaagcacagctgtagggcgctcctcacttaaaagcagctttcgaagctcctgaaactcattctgggaagcggcaggaacctctatacagtattcgggctgtacggttaatccgtggctgatcagcgcagtcatatagccggttttgcggtctgcggaaaagaccagggaattatctacacccagataagcgatcttccggtggcccagagcataaagatactccgttgcctcctgtccggccagaaggttgtcattatcgatatagattgtatgattggtgtattgtgccggttttccgatcaggatatagagaagtccttcactgaaaagaaaatcaataacaggatcattcacacgggaataaagaacaataaatccgtcaaccttaccgcttctggacatggaacgtactgcgttaaggatctcttcttcattctgaccggtaacaatggtgctgatatactgatgtgcgttacagtagtggctgatcccccggatcgtctcaaggtaaaaggaattctcgtatgtctcctttggggacggaggcaggatgataccgatggagcgggaaatctgtgctgccaggttgctggcctggaaattcggctcatagccaagctccgccatggctctgcgtacacgttccttggtttctttactgatagatggattatttttgcaggttctggaaacggtggacggggacaccccggccagagctgccacatctttgatggttactgccataaattgcctcctcacggatatgccggatcaaagcggaagtatgcctctgatccggctttttttatctcagtctgatagagatattgtagttcataacaaggatactgtcaaacatattgcacggaaaattgcatgaaattgcgtaaaaacagatgcacagaaaatcaggtagtgagatgcagatagattctgtttgacataatgaaaaactgcacaaaatcaggatgtaaaaattgtaagaaaggtagaaaagacaaaaacgcattgcacttcatgcaaaatggacgtataatttacgcaaacggttgcgtagattatatgaatatgcatccgtgagaggataatagataagatgctctgagatgcagggctcaacataaggagagaaaagatatggataaaagagcagctggcattctgatgccgatcacaagcctgccgtcagagtacggcattggatgtttttcaaagagtgcctatgattttgtggactggctgaaggaagcgggacagagctactggcagatccttccactgggacctaccagttacggagattctccgtaccagtccttctccacttttgcgggaaatccgtattttatcagcctgaaggcactggtggaggaaggcgtccttacaaaggaggactgtgataaggtcagctggggaagaagagcagacagcgtagactatgaaaaaatctacaaaggccgttacaagcttctccgcaaagcttacgaaaacagcaacatcagcgagaatccggattatcagaaatttgttgcagaaaacagctggtggctttccgactatgcactttttatggcagtaaaggatcagttcggcggtgttgagtggacaaaatgggcagaggatatccgccttcgctgggcaaatgccatggactactatcgcagagaattatattttgatattgaattccagcagtatatgcagttcaaattctatgagcagtggatgaaactgaaaaaatatgccaacgaaaaaggcattcagatcatcggagatatcccgatctatgtagctatggacagtgcagatacctgggctcatccggaacttttccagctggatgaggagaatgtgccggtggctgtagccggatgcccgccggacggtttttccgcaacaggacagctttggggaaatccactgtaccgctgggattaccacagaaatacaggatatcagtggtggatctccagactgagctacgtattccgcctttatgacgtggtaaggatcgatcatttccgtggctttgacgagtatttttccattccgtacggtgcagaaaatgccattggcggtcactgggaaaaaggtcccgggatcgatctgttccgtaaagtggagcaggcccttggctggaagcaggtcattgcggaggatcttggctatgtgacagattctgtgcgtcagcttgtccatgacagtggattcccgggaatgaaggtcctggagtttgcgtttgattccagagattccggctgtgccaatgattatcttccacacaactatccggagaacagtgtggcatacacaggaacccatgataatgagaccatcgccggatggtggaagagcattatggcaaaagagcgtaagcttgccagggattatctctgtgataactatacaccggataaagagctgcataaatgctttatcagcctggttatgagaagcagtgcaaagctctgtgtgatccctatgcaggattatatgggcctggataacagctgcagaatgaaccagccttccacagtaggaaagaactggaagtggaggatccgcaaaagggagctgactgtgaagcttcagaaagaaatccatgatattgcacttcgctacggacgtatgaactggtctgattaaaagagagatccaagagacatattccatttaaacgggacgtgaaagaaagtagaaagattttagatagaattgtgattttttatgtgatataatgctgtttcgtggaggcagctgtcagtaaaaggtaaggctgacagctgccttattgtattttcagatctgcggtaaatgataaagtgatacatttatatatgcagaagatcagaagagagtgtctgatctgtagcagtggataatcctgaataacggaagattttttacaataaggggagaattatgacaggaaaaacacacgcggcagtcggactcggaacagtgctggcagttacacagccctctacgttttccggtctggtacttgcggcaggaacaggaatgcttggagcattgatcagcgacattgatgtaggaacctccaaatcccataaggatgcggaccggatcacactgatcgcggtactgcttgtggcagcagagatcgcattgaattatttttataatttttccatctgggaaaagatccgcaataaccagtctatggcgccggttgccatgggagttattatttttattgcagtctgcgcctttggaaaaaatcagccgcaccggtcatttatgcattcgatcatggctatggccattttaagtgcagccatatccatggtgtccgtgaagctggtcctttattttgtggttggattcgcatcacatctggtgctggactgctttaaccggaaacgggtacggatcctatatccgctgccgggaggcattgcgctggatttctgtaaggcaggaggctttgtggattccctgctttttaagcttggatctgtagctgtgatctttgagcttgtatatctggctgtgcagatgggagagaactggaagctttttcgaatgtagaggatgtttcatttaccgattacggataattttatatggggcagatattgcaggaactgaaggttagagcgtgtttgaaaaatcattcccgtaatctgcacgccccactttgcggtatattttacccgaattcagttgccgtagcccgctacggcgcccttatccggacaaaatctcccacaaattgtgacgcacatcttgcagaaagcctttttcaaacacgctctaagccaaaaaaggagcagattttccaaatacggaagatctgctctttttaaccgaatcaagggagtcccctgtttcaattacaaatatctgcctgactcaaatgcggatcaggaatatccgactgacggtttataagtgtgatcatttattctttctgatcctgcaggcacatgctgtgtaaagtacgtctgtggaagagttcagtgctgtctcacaggaatcctggatcacgcctacgatgaaaccgacaccaactacctgcatggcaacatcattggggattccgaaaaggctgcaggccatcgggatcagaagaagagaaccgccggcaactccggaagcaccagccgcacttgcagcagccaggatgcagaggatcagagcggtcgggaagtctacgctgataccgagtgtatgtgcagctgccagagccatgatggaaatggtgatcgctgcaccacccatgttgatggtcgcaccaagagggatggagatggagtaggtatcctcatcaagtccgagatccttgcacagctccatgtttaccggaatgttggcggcagagcttcttgtgaagaatgctgtgataccactgtccttcaggcagcgcagaaccagcggatatggattctggcgtgtgcagatgaaagtaatgatcgggttgatcaccagtgcgacaaagagcatggttcccaccagtacacagatcagacggccatagcttaacagtacgccaagcccctgctcggagatggttgtgaagatcaggcccatgataccaaatggagcaaggctgatgatccatcttacggctgtggaggttgcatcggaaatgttttcgatgacagtcttggtagtttcacttgcggccttcagtgcgataccgaagatgatggcccatgcaaggataccgatatagttggcgttgacaagtgcgtcaaccgggttggaaacaatgttcatcagaaggtttttgaggacctctgcaacaccgcttggcggagtgacgtcggaagtatttgtactttcggaaaaagtcagcatgatcgggaacaggcggctggagatcacagctgccagtgctgagagtatatttcccagaagataaagtacaacaacgaatttcatgtttgttttctggccttttcccatgtggcacagagagctcattactaggaagaacaccagaagcggagcaattccacgaagagcaccgacgaacagatcaccgagaatggagatcacagatgcctgagggattgcaagtccgagaatgataccaacgatcagaccacagatgatacgcttgatcaggttgatgctgttccatttttgaatcaggtttttcataactagtttcctctttcctattgtgtgagtgtgctaaaaaatgctgagccgcaaagcaacgatccagtgtaaagggcggatcgttctaagccggtattactgcatcgcgtaaaagcacaacaggataattatatacaattatgtccgccttgtaaagacaaatgtacataaaacgcgagaaagatataaaaagcgccagatcaatgcttcgtctggcgctatatatttgaagtatcaggtccgaattttccggaagcttacagcaaagaacagaacctccgcaaagcctgtaattccccatgagaaaatatacaggagataaagtgaggaaatggtctggaagtgtgcaaacaccgtatagaaccagatgacacggaatacacaggatcccagaatgatgatgatggtcggtgggatactttttccgatgccacgggaagcggcgatactgcaatccataaaacagctgaaggcatagctgaagcccatgatccggatcctctccatgccggcatcgatgactgccggttctgtggcaaacagtgacagaaactgcggaccgaaaacaagaagcagtccaccaaggatcgcgcctgcgatgaaggcataggtaaggctgatcccataagttttcagcatacgttttttatttccggcaccccagttctgaccgatgaagcttgcgcatgcagtatagaaagcaaacatgacgttgtagatcagagagtctgcatttgcggcagcggcatttccggaaaccgtgactgcatcgaaggagttgacaccggtctgtacgaacagatttgcaatggcaaaaatcccgttctgcagacctgtgggaataccaagaagcagtactgctttacaggccttcgggtgaagacggagcttacgcagggataccctgcattcgtcttttctccgaaggaggtggatcattaccagcgctgcggagatatacagtgcgatcgcgctggcagttgccacacctgcggcggccatatgacagacgataacgaaaaacaggttcagaagaacgttgatcactccggcaatggaaagatagatcagcggtcgcttcgtatcgccgcgggcacttaatacgccgttaccgaaattgtatacagccatggccggcatacccagagcataaatcttcatatataaaacagcctggtccatcagctccggtttcgtattcatcatggacagcatctgtccggaaaacagaagacagacgacacagactagaagtcctgcgatggcacagagaagaagagatgtatgaatcgtttcttcggtaccttttctgttttcggcaccaagctcgtgtgctacacgaacattgactccggcgcccatgccgatcaggattccggtaaataaagtgaccagcagagttgtggaacccacagctccaagtgccatgtaatctgcaaatcgccctacaaccgcaacatcacttaaattaaaaagaacctccaacacctgggaccccatcaggggaaggctaaagaggaggatatttttccagagagagccggaggtcatctcaatggaagacgttttctttttttcattttcacacatagtttacctcataaaaattataaaaaattccttcatccaaggtatacaatactatgttggaataggtttgtaaagaggggaaaatagttcttttatcaggcgcagaggtttgtttttatttatagattctacattgatttcagtacgaacaatgatataataaatgagagtaataagaaagtattttcagaaatattggaaatataaaatacagcagaccaaggaggaactcaatacaatgaaaatcggaaatgatatttattatgtaggagtaaacgatcatcaggtagacctgtttgagggacagtatgtagtgccaaacggaatgtcctacaactcctatgtgatcaaagatgagaagatcgcagttatggacactgtagatgccggcttcacagaagagtggctgggaaaagttgcagaggttctggatggtgcgaaaccggattatcttgtagtccagcatatggagccggaccatgcagcaaatattgagaatttcatgaaagtatacccggatacaactgttgttgccaacacaaagaccttcaccatgatggagaatttcttccgtggaatggatctggaaggaaagaaacatattgtagccaacggtgacaccctgacacttggaaaacacgtccttaccttcgtatttgcaccgatggttcactggccggaggttatggttacatatgacagcacagacaaggttctgttttccgcagacggcttcggcaaattcggagcgctcgatgtagaagaggactgggactgcgaagcacgtcgctactatatcggaatcgttggaaaatacggtccgcaggtacagaagcttctcaaggcagcagcaactcttgatatccagaccatctgcccgctccacggaccaatccttaccgaaaatcttggacattatctggagaaatatgatatctggtcttcttataaagtagagagcgaaggcgtaatgatcgcctacacatctgtatacggacatacaaagaaagcagcagagcttcttgcacagaagctggaagaaaagggctgcccgaaggttgttgtctgcgatcttgcaagagaagacatggcagaggcagtggaggatgctttccgctacggtaagctggtactggccagcattacatacaacggagaagcattcccgtttatgcgtacattcatcgagaacctgacagagcgtaattaccagaaccgcaccatcggcctcattgagaacggaagttgggcaccgactgcagctaaagtcatgaaaggaatgttcgagaagagtaaaaatatcacatggcttgagaacaatgtaaagatcatgtcctccctcagcgatgagaatgtggcagagatcgatgcaatggcagaggagctctgcaagtaatttctgaataccagaacagcttataaaaaataaagatataacataataaaaagacgtggatccggatcgatatatttcgttcatttactgagttgttaatgaacgaaatatatcgatccgtaaggccacgtcttttttatttacatgaacaacaaattaaaggtaagtacagtgatctcatgatcctagaaactgccacaggatcattatatcctcttacaccacataaatccataagccggaagctccacgtccttaagctccagtgtctggtcagtgatcagatcgcggaaggttccttcctcctgcatccaggcagttttttcgctgtcactgaaattgaagattccgatgaaacgttcgtttcctttctggcggaggatgcagagaatgctgtcatcatgaacatcgtatgtatatacatcacagtctttatcaaaaacagattcctggctgcggatctgctccatgcggctaagagtctggaagatctgtccctcaacggaggatttggagttcctttttccggcaagctcccactggaaagcaccacggtggatatagcgggaatctgcagccttatccggatcctctttataggaataatcattgagacgtccgatttcatcggagctgtaaagcatcgggattccggactgggtaagcatatatgcgtgaagcatcagatcctcgcggataccccttttcagcttctcgtcatctttttcaaaaagagcagcctcgatcccgcacatggaagcagtagttccgcagaagcgggcatcctgagttaccgggtcatcattatagagttctccgcggctgtcgcttcccggatgctttcctgtaaagaaatcattcaggtaacgcttatgggatggctcatccatgccccagtctttcagggtggcgaaatcaagtccccagccgatatcgtcatggcagcggagataattcaggaaggtgtactgcttcggaaggctgtttacaatatccatctgttttttcagaaggcggatatcacgagtggcaatgctgttccaggttgtagccatggttgttacattgtaaagcatatggcattccggcttctctacggttccgaaatagggaacaaccttctccggctccataacgacctcacccagaagtacgacacttgggcagacgatctcggcgatcatacgcatcatacgaacgatcgtatgcacctgcttcaggttacggcaaggagttcccagttccttccagatatacggaaccgcatcgatacggatcacgtccattccctggtttgcaaggaagaggaagttgtacatcatctcattgaaaacacggggattgccgtagttcagatcccactggtacggataaaaggtagtcatgacatagtgaccgatatccggaagccaggtaaagttccccggagcagtggttgggaatacctgtggtacggtcttttcgtactcgtccgggatctcacggttgttgtagaagaagtaacggctcatatattcgccgtcaccctggcgtgcttttttggcccactcatgatcctcggaggtgtggttcataacaaaatccatacacaggttcattccgtttttgtggcatttatctgcaagggcagccaggtccttcatggaaccaaggtccgggcggactttgcggaagtcggctactgcgtaaccaccgtcggaacggcccttcggggtatcaaggaacggcatcagatgcaggcagttcacgttgcattctttaagatatggaagcttggcagaaactcccttgatgttgccggcaaaattgtcaatatagagcatcatgccaagcatatccttttggcggaaccagtccggatttttttctctttccaggtcgcggtttttgagcgcgcggcggcgtgctgtaaaatactggtacatctggtcgcagagctctgcaaacatatcgtcattgtgataaagctctgtgtacagccatcgaagctcgtcgtgatgatggtttaaacgttcctgaaaaatttcctgatcttttttcatgatttcctccctgaatagatatttatagatgtcgggaaacctgtaaaatatttcccggcggtaatggttatctgacatttttccacagaattatagcatgaagtttccagtacatgaatatacgggttgttatggaatatggaaaaatgttgtaagtattttcagtctcctgttgtctgtcgtcgtatcagaacaggagtgatctttttgtggatcggtttttgaagcggtgccggttttcttttcttcatttcgttcatctgttccacaagcagttccatggtagtctgtgcgatcacatcaatctgctgtccaatagtagtgatcggaatgatggactccgcagcaatgggtgaattatcgaatccgatgatctgatattcatccggcagacagttgtatttctggaagatcagattgagaaatatatttgcgtaagtatcattggataaaaatatgccttttttctgaccggaatatttactgtcaatatcctgaaagatcacacgcatctgttcaaaaagctcctgataggaatcaccggaaacattaaggttcagttcataaggaacatgatattcccggcatgtttcctcaaaggcacggatacggtcataagccggaatattctcaggtacatggacattgatgtggatcagtacatcacactgattacgtatcagcagagaagtagcctgcatgctgcccatgtaattgtctgttgtaacgctgcatatatgttctgcttcacgttcaatggcgatcacaggaatattataggaagccagtttttcagaggaaagagtatggctgagaacaataagtccttcaatcttataagccatcagctcgtccagatactgcatttctttctccgggccgccatcactgacaaaaaccagaaatttgtaatgataatcggagtaacttcgaagaagctgtgtcagcatttcggaataataatgaagataaaggtttgggacaatgatccctacaaattcgctttttccattggcaagaaccctggcaagcttgttttttctgtagccgagctcatcaagggcttttgcgatcttttcctgattttccagggttagagaatccggatgattgaaatatctggagatcgtagtcttggaaaaaccagtgtattctgcaatatcggcaaatgttacctgttttttagccataaaaaaatagtctccttttaacagcagaaagttatgatacggaatgcagatgtgatcatataagagaaagctgcagaccgtacaagataattggattgatgtaattaagtataacaatacagacgttaaatagcaataaaaaaataaccagttaagttaccggtaacttttcttgaataaattaacaaaaaaggttgacagaagctatgtcatatagtagtaaccggttactttaccggttactaaacaagaacgaaagaacaaaaacgggaggaaaagagaatgaaaaaaggttctgcgaaagctgttccggcaggaaaaagaactgctgcagaaaagcttcagtatgtgaaaaagaactggcagctgtatgtgttttttctgctgcctgcacttcttctgacgatcatcttcaaatacgtgcctatgggtggcgtactgatcgcttttgaggattacaatgtcattgatggtgtatttggaagcaaatgggtaggactggaatacttccggagatttctggcatcaccggattttatgaattatcttgtgaacactttgaaactgagtatttacggactgctgtggggatttccgattccgatcatcctggcacttcttctgaatcagatccggagagccgggatcaggaaaaaaattcagcttctgatctatgcgccgaattttatttccgttatcgtactctgtggtatggttcgtatgtttctttcaccggtaggtccgctgaataaactgatcggttccgatgccaactggatgactatgccggcagcatttcgtaccatttacatagccagcggaatctggcagacagccggatgggcatccattatgtatactgcagcacttgccaatgcaagtaaggatctggaagaggcagcagtggtggatggagcaaatatcctgcagcagatctggtatgtacagcttccggctattaaaaacatcattgtgatccagtttatccttcaggccggaaatattatgagcattggttttgaaaaagcatatgcactgcagacagatatgaaccttcctgcatctgagattctttctacttatgtatacagaatcggtcttctgaatggagactatggatattctacagcagtggggctgtttaattcagtgatcaatgtaattcttttgatctttgtaaactgggtagtcaagaaactgaatgacggagagggattataggaggtgctgttatggcaaaagcaaagaaaaagaaatattcggcatctgacaaagccattttaggaatcggatacgtacttctgggtgcatttgtactttccattctggttccgcttttatatgttgtgatcgcatcctttatggatccgaatgtgctgaacagccaggggatcagctttgatgtgcggaagtggacgatcgatgcgtaccgcagagttcttgaaaataatatgatctggagaggctttgcaaactcatttttttattccctggtgtttaccattatttcagttctggtaactctgctggcagcatatccaatgtccaagaaagaatttgtgggaagaaatttcttcaatgttatttttctcattaccatgtttttcggtggaggaatgatcccgacttttatcctgatcaatcagctgcatctggtaaatacaatctgggcaatcctgcttccgggtgcgtttaatgtctggaacatgatccttgccagaacctattatcagtctatccccaaggaactcagagaggcatctgccattgacggtgccacggaaatcgagcattttttcaagattatgatgccggtatgcaaaccgatcatcgcagtgcttgcactgtggtcctttgtaggaatgtggaacagttattttgacgctatgatttatttgaatgatgcgaaactgcagccattgcagctggtacttcgttccatccttgtacagaatacaccgcagcccggaatgatcgcagatatccagagtactgcacagatggcaaaggtagcggaacttctgaaatatgctacgatcattgtatcaagtttaccgcttctgatcatgtatccattcttccagaaatattttgaccagggcattatggttggttctgtaaaaggctgatgacaggaggttgataatgatgaaaaaaagaatgaaggcattattggcaatcgggctttctgcaattataatggtatgcagtgccggatgtggaaatggaaaagaacacatgaaagcagaaatagatccggatatcccggtggaagatgtgtcatttcctctgaaagaaaaagcagagctgtcttttattaccagtgcacctgcaacatctacacaggaacctaatgaaagaacgatttttgaaagactggaaaagcagaccaatgtccacattgactggacctgttttgtatcggatcagtttaatgacaaaaaaaatctggcactggcacagttcggaaatcttccggatggacttttcaacgcagggatgagtgattatgatcttcttcgctatgccaaacagggaatcattattccggtagaaaatcttattgataaatacatgccgaatcttaaggctgtattggaaaaatacccggaatacagaacaatgtgtacagcaccggacggacatatttattctttcccatggatagagcagcttggtgcggggaaagaagccattcaggcaattggagatattccctacattaataaaaaatggctggattatctgaagctggacgttccgaccacaactgaggaactggaacaggttctgatcgctttccgagacaatgcagataaactggaacaagaatttgatattgagggtggtgtgatcccgatgtcctttatcatcaataatggtgatcaggatcctgcaattctcatcaacggattcggagaaggatatggtgacaccggtgatcattttgcagtgaaagatgatggaaccgttatttatacaactgtacaggaaggctataaagaaggtattcagtggctccatcagctggtagaagaaaagctggtggatccggaggcttttacccaggaatggtcaacttatgttgcaaaaggtaagaaccacagatatggtctgtgtttcacctgggatattgcaaatattgataacaatgaagattatgtaatgcttccggcgctggccggtccggatggtcttgtaaatatcacaagacagaacaacagtgaaaccagtggctttgacagaggacgctgcgttctgactacaagctgtcggaatacggcactggcagcagcatggatcgatcagatgtatgcaccgatccagtctccgcagaataactggggtacttacggggaaaaagattcatttaatatctttgagatgtccgagaatgcagaaggtggtcagatgctgaaacatatggatctgggagatgcatctccggtagaggttcgtgaagcacagtctgtaaacggaccgttggcaatacttaacgagtattacgatgtatatgtaacagagccggcagatgcaaaatggcgtctcgacaatatgcacgaaacatatcttaaggatatgaacagtaaatatgtgtatccgaatgtatttatgagtattgatgataccaataaggtatctcagtacgacacggatatcaagaagtatgcggaacagaaaaaagcagactggatcctgaatggcggcatcgataaagaatgggattcctatctgaaaaagatggagcagtatggactgtctgattatctggcaatcaaacagaaatattttgaccagtatcagaagtctcttagtgagacagagaaataaaaacagaaaaagataccggtcagaaacataaaaaagaaagagagagcagagtatgagtgaaaaacttgaaaaagcacgtctttatgaaatagaggaagcaaaaaatatcccgcaggaagagaaaccggcctttcatgtatctgcaccggttggctggatcaatgatcccaatggattttctgtttttaaaggaaaggtacatcttttttaccagtatcatccttacagccgtgactggggccctatgcactggggccacagtgtgacggaggatatgatcagatgggagcagcttcctgcagcgcttgcaccggatcaggaatatgatcgagagggatgcttttccggaagtgctattgaagcggatggaaaacatgctttgatctacacaggagttacaacagaaaagctgcctgatggaaaagaagaagtccggcagaatcagtgccttgcctggggtgacggaaaagattatgtaaaggcagagaaaaatccggtagtcaccggggatatgcttccggagaaatgcagcagagttgatttccgtgatccgaaggtatgggaagataacggaacataccatatgctcgtaggatgccgcagcgaagaaattcctggacaggtagttctgttttccagtaaagatctgaaagaatggaaatttgaaacaattcttgcggagaactccacaggagaaatcggtgttatgtgggaatgccccgatttctttccgctcggggataaacatgtgctgatctgttctccgcagcatatgcgggcaaaagggtatgagtttcataatggacataattccctgtattttacgggagattatgacagcgaaaaacatacatttgaaaaagacgcaccggtaagtctggactacggacttgatttttatgcgccgcagacaacccttcttccagatggaagaagagtaatgatcgcctggatgaaatcctgggatagctgtgtgatcaaggaaaagcagagatggcagggaatgatgactcttccgagagagctggaatatcgtgacggaaagatctggcagaagccggtccgagaaattgagaattatcggaaaaaccgttgttgttatgagaatgtaaaagtgggtgagagcttaagccttgaaggcgtccgtggccgaatgatcgatctgactgtggaattgcagaacgcagatggcatcatggatggaagcaggaactccggaaatccaaatcaggaagcattagatgtgtacaatgagttccggatcgagcttgcacgcaatgaagaatatacaacggtctttacctatgatcgaaaaagacagatactggagatcgacagaacctggagcggggtgcagcgtgatgttgtatgtacaagaaagctccagatcacagatgacagacaaaatctgaagctgcgttttatcctggatcgaagctccatagagctttttatcaatgatggaagcaaaactgcgactaccgtgatcccaacaccagtggaagcagatgagattctgtttcacagtgacggaaatgctgtgatccaggttgagaaatatgatattgtgttgtagaagcctctcaaatattgacaatttctctatttttgtataacataggggaagttgcttacgccggatcaggagttattcgtatctcctgatccggcatatatttacaggagaggaacacaggaatgttttatcagttaaaaatcacaagaaaaggaacgaaaccgccggtatggagacgttgtactgttgcggctgacgttacatttgcaaatatggcagccatgcttgaaaaactggttcagtatccggcaggcagcctatatgagattgaattttttcagaaaaaagtacagatccgtgagaacggtgacggagaagcgaagaataatttcacattattaaatgcaggcgagacagagactgcagagcttatggattccgagaaatggtttaccttccgtcagtatggtgcggataaggaagctccggaatacagagttgatattgagaagaaagacgagggaacagcagaagctccttctattataaaagaagtaaagggtgaggatgatccgtactggacagaggcaccagagctgggatgcactgcagcagttgaaactgaggtggaaacagccaaagcatcggaagacattgctgcaacagtagcggcagtagaggcagcagccagagctgcaaaagcagatgaggcagccacaggtagcagaagaaatcctacagtaaaagatttcctcatgtcctatcgtaaagaagaccttctcagcattgcaggtgagcttggacttcactgcaagggaatggatcaggaagagatcgccgcaaaggttgccgcagaggttcttaaaccggaggttatgaaagcaagcttcctcgtagcagacgatcaggaggtactggcttttgaggcggctattcagagaaaatgcttccatgttacagaggatgagtggaatacattagaatggctgaacgatatgggctaccttgtctcctacagtgatgattacgcagaagttccggcagaggttgtagctgtttacgatcagatcaatacaccggagttccagacacttcgcagccaggtaaactggctgaaggattgccttattatggtaagctatctgtatgtatctgcaccggcaaagaccgtatatgagatgtttaagcagagaaaaggctttgacatcggatatgacagcttcatcgagctgtatcataccattccggagaaggcctgtatctgtgagcttgcggaggatcagctgatcctgaaatccgcactggtcaataacatctacaaggatatcgagagacgtcagggtggacggaaattctatattccgtctgtagatgagatcctggattattccgaaaacgggtatccaacaaaatctgcttcttaccagagactgggcagattcctgctggatgagatgaaggtttccgatgcagtgaaggatcaggtactgttctttatttacaaagaatgctccatggatggcagaatgtcagcgatcatggaaaacctgaaccagaaggggatccagtttaacgatgagcagcttgagaaatttacaaagctgatcatggaggcaaacaataacacaagaatgctggaattccgcggttacacaccgaatgagatctcaggagcagtatggccgtttgccacaggcaagccgcacactgcaatgccgaacagctttgtgccgacagcaatgccgatgcagccggcatctgcaagaaaaatctacccgaacgatccgtgtccgtgcggaagcggtaagaaatataagaagtgctgcggaagaagataattctgcagaaaatttaccgtaattccggagctgaaagttcccatagatcgttgcggagcgactgcgctcatgagtgagcagcgaacgcggatgatctggtccgatttattgtttgatgcagtatctccggaaataccatacaaattaatataagacagttcgtttgtaccatcctgtctataaataaaaccagggctgaagaagatgtgagaatcagggcagactcgtggcgggtctgccctttttttactttaactggatcaaggccgggaacccggctttttttatttatggaaatatccggatggtgtgacagatccagaaggaggaaaaatttatgtatcagttaaaaacagaagcagatttcgattcggcacactttctgtccggttacaccggcaaatgttccaatatccatggccatcgctggcatgtggagattgagatcgaaagccggaagctggagaaaaacggtcaggggcgagggatgctggtagacttcggagatctgaaaaaggatcttcgggagctggcagattccatggatcacacgctgatctatgaagaaaatacattacgtccgaaaacgctggaagcactggatgaagaaggctttcatctggtgaaggttccctttcgccctacagcagagaatttttcagaatattttttcaggaaaatggaagaaaagggctatcctgtaaaaagagctgttgtttacgaaacaccaaataactgtgcagcttaccgggaaacggaagaagaaacggaggcggtatggctatgagtacctatcaggttgtagagaaatttgtcagcatcaacggagagggcagacgggcaggagagcttgccgcttttatccggtttaagggctgcaatcttcagtgcagctattgtgataccagctgggcaaatgagccgggatgtgagagtgaaaggctgacagaagaagagatcctttcctggatccgtgaaacaggcgtaaaaaatgtgacacttacaggcggggaaccacttttacggaaaggcatggaggagctgatcgaggcaatcctggaggatccatcccagcgggtggagattgagaccaatggaagcgtagatctgaagccttatcatatattaaaaaaacgtccgtcctttaccatggattataaagcaccggacagcggcatggaaaaagagatgctcctttccaatctggagcttctgggcagtgaggatacgctgaaattcgtggtcagcagccgcagagatatggaaaaagccctggaaatcctggaaaagtacaggctggtcggaaaaacggcagtttatttcagccctgtatttggcaggatccagccggtggagatcgtggatttccttatggaaaaaaagctcaacgatgtaaaacttcagatccagcttcataaggtgatctgggacccgcagaaacggggagtatgacaggaaaacatatcacaatataacaagaaataccgcagaaaaggagaacgctatgaaagcacttgtacttgcaagcggcggtgtggattccaccacctgcctggggcttgccgtaaacaaatatggaaaagagaatgtaattgcattaacagtagcttacggacagaagcacacaaaagaaatcgaggctgccagaaaaacagcagaatattacggagtggagcatctttatctggatctggagccgatcttccggtacagtgactgctcgctgctgaagcattcagacagaaagatcccgcacgaaagctatgcagagcagctgaaggaaaccgatggttcaccggtttcaacctatgtgccgttccggaacggattgtttctttcctcggcagcaagtattgcgctgtcaaaaaactgcagtgtgatctattacggagcacatgcggatgatgcagctggaaatgcatatccggactgcagcagtgcgtttcacaatgcgatcaacgaggcgatctatcagggaagcggcggccagctgaaggttgaggcgccttttgtcagctgcacaaaggcagaggtcgtaaaaaccggcctggagctgaatgttccttatgaactgacctggagctgttacgaaggcggcgaaaagccctgcggtgtgtgtggaacctgtattgacagagcagaggcattccggctcaatggagtgaaggacccggcacttgacagatagattggatcataaatatccgtttgaccatagaaaggaaaaaatatgagcagagaaaacctggaaaaagaagggatcacccttctcggaaatcagaaagtaaaatatccggacaattatgctccggaggtactggaaacatttttgaacaagcacccggacaacgattactttgtaaaatttaactgcccggaatttacaagcctttgtcccattaccggacagccggatttcgcgacgatcacgatatcctacgtacccggtgaaaaaatggtggagagcaaatctctgaagctgtatcttttcagcttccgcaatcacggagattttcatgaggattgcgtgaacatcattatgaaggatctgatccgtctcatggatccgaaatacattgaggtctggggaaaatttacgccgagaggcggcatttccattgatccatactgcaattacggaaaagccggaaccagatgggaggagattgcctggaaacgccttgcagagcatgacatgtacccggaaaagatcgataaccggtagaaaaacaaaaagtccctgttttcactgcgaaaagcaatgaaagcaggggctttttgtttaggtgcgcctagcggcgcaggtttatctttatgacagccggatgcactccgattctgtgtcaaacagatcagcgatcacatcgtgcacggtttcgatcttatctgccatataggcctttgctccgcagaacagcaggccgttttccacgtcgccttttacggcggcgatcagcttgtctgtaatgcagtaagggatctcgccgggggaacatttggcaaggcagcggtggcagggactgtgcgggattttttcaccggccatgacgtgctgcatgaaggagttcataatggcacgtcccggcatacctaccggactttttacaatggcaatgtcgtcctttgcggcgtggatcagggattctttcagccggatgtctgcgtcacattcttccgttgggataaaacgggtggcaacctgaacgccgtccacaccaagatcaaggacatgctttacatcctcgtgcgtggcgatgccgccggcagctactacagggatttccgtgccgaattttgcggcatagctttttacagtctggacgatctttcggatctcattgtcgtaggcttccggtgtataggaatccagctcttccttgtggaagcccagatgaccgcctgcctggggaccctcgatcaccacaaggtctgcagtgcgcttgtactttctttcccagtatttcaggatgacctttgcagatttgtccgttgagacgatgggggcgatctttgttttacttccgctgacaagagcagggagctctgtaggaagtcctgcaccggagatgatcaggtcagcgccggcatggacagcggcttttacatgagatgcgtactccttcagcgcaaccatgatgttgtagccgatgataccgtcaggagaaatcctgcgtgcttttttcatctcggacaggatagcccgctggttggcttcttcggtattccggtcgaaatctttttcccggtagccgatctgagcggtggaaatgattccgattccgccttcctttgcaacggtgcctgccagacggccaaggctgatgccaacgcccattccaccctggatcaggggaaatctcgtaagtttatcaccgattttaaaattcttcataatgatcagatcctcacattcatttgctttcgctaaataattttagtataaaatagttttatcatcaaagtatatcataacaggggaatttgtcaatgtaaatgtcggtgaatcagggaagtcctctgcttcaattgcgaatagctgtttgaccagattttgttaaaatccactttgttgacagaacagaaaatatcaggcaaattcacagtgatatcagctttatagaaaactgtaaagtgaattagaggaaaagggaggaacaggtatgcgaaaaaagacgagtaccatcatggcctggctgcttgcggcgtccgtgacagtcacatctctgtcagcgggaaccgtgacggcctatgcacaggaggaaatgccgctggcggaagccggaaccgtgacagagagtgcggaagagggcaatattgaagctaaagaaaagggtgagctgacagcattatgctgtgtagtttcaccctttttatgtgtgatgaaatttttaaactgtaaagcagtagactgtgtccggaatccctctggcaaaatcagaatttaaacagattcagaccgatctcctgactgaactcacggccgatctctccgtcgatcacctggatctggatctcggcagtagcgctgatgatggcacggttcagatgaccgccgtgtacatggccttcctcgtcaccggctgcgatatggagatgaagataaacgtcaccgtctttgcgggtaacggtaccggtaagtgatacgatctcaaacgctccctggaactgaatagagtggtattcctttgtcactgtgttgtatacgcctgcagtgaaatcattgatggcgccaaggcctgtgacctgtgcaaggcggatattctctttttttgcaaccttgccgatctcctccaagatctcttccttcggatcaagacgaagatagatcgtgtttccaaaacgtctgtattccatgataaaaacctccctttgtgtgatatttgccataaacagaggcggatgtttttatccgcttgtcaataagtataatacattttatttttttacggaaggccagggaaagagaatgccggagtctcatgtctgtgcgagagatttttttgacgtctgctcttagcattggaggcaggcggggatacgtttgaggtttcgttagggggatgtggttgagggatgccagaggaaggaggcatcgctccgggagtggatgcagtcgggggtgtttttgaggttttgagaggtggatgtggttgaggaacgccagaggaaggaggcatcgctccgggagtggatgcagtcggggatgttttttgaggttttgagaggtggatgtggttgagggacgccagaggaaggaggcatcgctccgggagtggatgcagtcggggatgtttttgaggtcttgagaggtggatgtggttgagggacgccagaggaaggtggcatcgcaccgggcagggactccgtcgggggatactactagggctccgtgagacggctaaaagcattgcggcagggccagaactcgcctccggctcagacagcagaccctgccgcaataacgccgtctcccgcagcccaagtagtaatcacccctcctccgcagcagcccggcccgatgccaccttcctctggctgacgcttccaaccgacaggaaaaaacatgcgggggatggaaacggactgggcgtcctgtcctgaaatgtcagaccggtacagaatattcctataagtatcgaagaatacagaaacgggatcggcacggcataccaccataagtaccgaagaatacagaaaccagatcggcacaacgttccattctgagtaccgcagcatacagacaaaagtcaacaacgcagcgcacacaacaacgaagaactacttccgtgcccaagagggtgggggtgcagggggagggccttcgggctacggaactctgagatggccttccccctgcatattcccgcattgaaaatgcgaccggcgtagcgccatccagcgaagagtcttattataaaaaacaacacatataaaataataaacaggaagataatagcataatggatgaatgatagcagaaaagaaattgtcctataaaaataaacttccaggaaaatctaaaaaaattgaaatttatggttgacaagcataactcccagtggtattataactgagctgtcgcaaataattgtttttaaaaaacaaacaattaaaaaggatttcagaaaaatgaaattcacagttgacaaaagacagaatatatgataaagtatccaagtcgtcaacgaaacgacaacaaaatcttaactcaaaaatgtttgaaaaaaacttaaaaaagtgcttgacaaacaaaaagaaatgagataaaataaacgagctgtctgagagacagacacaacaaaccttgataactaaacagtgaaacacatacgattctcgaaaatttctttacatttaaagaacggtttaaacaaaccaaaagcagtaaaaacgagagatagccaaacggttgtcttgagtaaaagattcaaacactttatcagagagtttgatcctggctcaggatgaacgctggcggcgtgcttaacacatgcaagtcgaacgggaaaccttttattgaagcttcggcagatttagattgtttctagtggcggacgggtgagtaacgcgtgggtaacctgccttatacagggggataacagtcagaaatgactgctaataccgcataagcgcacaggaccgcatggtccggtgtgaaaaactccggtggtataagatggacccgcgttggattagctagttggtgaggtaacggcccaccaaggcgacgatccatagccggcctgagagggtgaacggccacattgggactgagacacggcccagactcctacgggaggcagcagtggggaatattgcacaatgggggaaaccctgatgcagcgacgccgcgtgaaggaagaagtatctcggtatgtaaacttctatcagcagggaagaaaatgacggtacctgactaagaagccccggctaactacgtgccagcagccgcggtaatacgtagggggcaagcgttatccggatttactgggtgtaaagggagcgtagacggatggacaagtctgatgtgaaaggctggggctcaaccccgggactgcattggaaactgcccgtcttgagtgccggagaggtaagcggaattcctagtgtagcggtgaaatgcgtagatattaggaggaacaccagtggcgaaggcggcttactggacggtaactgacgttgaggctcgaaagcgtggggagcaaacaggattagataccctggtagtccacgcggtaaacgatgaatgctaggtgtcggggagcaaagctcttcggtgccgccgcaaacgcattaagcattccacctggggagtacgttcgcaagaatgaaactcaaaggaattgacggggacccgcacaagcggtggagcatgtggtttaattcgaagcaacgcgaagaaccttaccaagtcttgacatccctctgaccggaacttaatcgttcctttccttcgggacagaggagacaggtggtgcatggttgtcgtcagctcgtgtcgtgagatgttgggttaagtcccgcaacgagcgcaacccctatccccagtagccagcggttcggccgggcactctgaggagactgccagggataacctggaggaaggcggggatgacgtcaaatcatcatgccccttatgatttgggctacacacgtgctacaatggcgtaaacaaagggaagcgaacctgcgagggtgggcaaatcccaaaaataacgtcccagttcggactgtagtctgcaacccgactacacgaagctggaatcgctagtaatcgcggatcagaatgccgcggtgaatacgttcccgggtcttgtacacaccgcccgtcacaccatgggagtcagtaacgcccgaagtcagtgacctaaccgcaaggaaggagctgccgaaggcgggaccgatgactggggtgaagtcgtaacaaggtagccgtatcggaaggtgcggctggatcacctcctttctaaggaaaaagtagagagtaagaatgtgttttactgtttagctatcaagctgagatatttctggtgccgatgcggttgggggacacacccgttcccatcccgaacacgacggttaagacccaatcggccgatggtactgcactggagacggtgtgggagagcaggtgggcgccagatcaaaaaaagaaaaacaggagagatcctgatgagaatagatgctggttttaccagtgatttaagaagaaaagatattttctttttaaatggctgataaaacatcagtcagcattgtaccttgaaaactgcatacatgagatttgattaagttaatcaaatatccttaaacgcaaagtattaagaaattaatgcaaacgcaaagataggaagacatcgatttatctgttattgaacagagtaatcaaacacatgtcggaagatacgagagtatcggaagacacgagaatcaagagaccgcatcacctacgctagggtgatgaagcgaaaggtcaagcaataagggcacagggcggatgccttggcactaagagccgatgaaagacgtgataagctgcgaaaagcttcggggaggagcaaatatcccgtgatccggagatgtctgaatggggaaacccgcatgagcagacctcatgcatccatacgccaatccataacgtatggaagggaacccggggaactgaaacatctaagtacccggaggaaaagaaagaaacatcgattccgtaagtagcggcgagcgaacgcggaggagcctaaaccggtgtgcgtgcatgccggggtcatggactgcatttaagattcagcgaagttaacagaacggttttgggaaagccggccggagagggtgaaagccccgtacgtgaaagcagagctgactgagcaggatccggagtaccacgagacacgaggaaccttgtgggaagtaagggggaccaccccctaaggctaaatactacttagtgaccgatagcgcatagtactgtgaaggaaaggtgaaaaggaccccgggaggggagtgaaagagaacctgaaaccctgtgtctacaagctgtggaagtactttatatgtacgaccgcgtactttttgtagaacggtccggcgagttacgcttactggcaaggttaagcacttcaggtgtggagccgtagggaaaccaagtcttaatagggccagagtcagtaggagtagacccgaaaccgggtgatctatccatgtccaggttgaagctgccgtaagaggtagtggaggaccgaacccacatccgttgaaaagggtggggatgaggtgtggataggggagaaattccaatcgaacccggagatagctggttctcctcgaaatagctttagggctagcctcggtgtgagtcttgcggaggtagagcactgaatttcctagggggcgtcaaagcctaccgaagaatatcaaactccgaatgccgtgtagatatcaccgggagtcagactgcacgagataagttgggcggtcaaaagggaaagagcccagacctacagttaaggtcccaaagtgcgcgttaagtggaaaaggatgtgggatttcgaagacaaccaggatgttggctcagaagcagccatacattcaaagagtgcgtaatagctcactggtcgagaggtcctgcgccgaaaatgtccggggctgaaacgcgccaccgaaactaaggaatctgaaaagattggtagaggagcattgcatgcgggaagaagcagtaccgtaaggagctgtggactgcatggaagagagaatgccggaatgagtagcgagatagaggtgggaatcctctaggccgaatatccaaggtttccagggtaaagctgatctgccctgggtgagtcgggacctaaggtgagggcgagagccgtagccgatggacaacaggttgatattcctgtactgcagtatgacagaactgtggggacacgtaaggagaacgggagccgggaatggaaagcccggtacaagcgaggtaccagtatggtaggaaaatccgccatgcaatgggaagacgtgatgtggagcgaagattagtagcgaagcccgtgagccatgcgtcaagaaaagccgctatcgttcatattgtacccgtaccgtaaaccgacacaggtggatgaggagagaatcctaaggccggcggaagaagtattgccaaggaactcggcaaaatggccccgtaacttagggagaaggggtgcctgcgagagcaggccgcagagaataggctcaagcaactgtttagcaaaaacacaggtctatgcgaaaccgaaaggtgaggtatatgggctgacgcctgcccggtgctggaaggttaagaggagaggtcagacgtaagtcgaagctttgaatttaagccccagtaaacggcggccgtaactataacggtcctaaggtagcgaaattccttgtcgggtaagttccgacccgcacgaaaggcgtaatgatttgagcgctgtctcggcaatacatccggtgaaattgaagtgccagtgaagatgctggctacccgcgccaggacggaaagaccccatggagctttactccagtttggcactggggtccggtgttgcatgtacaggataggtgggaggctgagaaacggtagcgtcagttgccgcggagccgctgttgggataccacccttgtgatattgggcttctaaccagccgccgtaatccggcggtgggacaatgccaggcggggagtttgactggggcggtcgcctccgaaagggtatcggaggcgcccaaaggttccctcagaatggacggaaaccattcgaagagtgcaaaggcagaagggagcttgactgcgacaccgacgggtggagcaggtacgaaagtagggcttagtgatccggtggtattaagtgggaatgccatcgctcaacggataaaagctaccctggggataacaggcttatcactcccaagagttcacatcgacggagtggtttggcacctcgatgtcggctcatcgcatcctggggctgtagtaggtcccaagggttgggctgttcgcccattaaagcggtacgcgagctgggttcagaacgtcgtgagacagttcggtccctatccggcgtgggcgtaggatatctgagaggagctgtccttagtacgagaggaccgggatggacggaccgctggtggaccggttggcttgccaaagccatggccgggtagccaagtccggaagggataaacgctgaaggcatctaagcgtgaagcccccctcaagatgagatatcccattcttagtgaagtaaacccccttgaagacgacgaggtagatagggcagaggtggaagtgtggtaacacatggagctgactgttactaatcgggtgagggcttgaccaagaaacgcaggttaagaattgattcaaagagtttgattaacgatcaacaagcatgtatgtagttttgagagtacaatgtaaaagaatttgtggccaacagccactttttcttgtatataggggattggtcaaatggtatgataggggtctccaaaacctttggtgggagttcgattctctcatcccctgctccttaggagcctgaaagcctttaaaatcaaggcattcaggctcttttgttttgtccaaaaagggcagggcaccaaagttggtaccctgccaaaatccagacaaaaaggaggttgcacgtcaaagatttcttcccccggtatgattgcaaattagaacattttgagcaagagatggaaatgaattacgatgaatttgtgtcatatttattaaagaaatatggaccagctaaatatgattattttacaaatgctacttgtaaaactaaaagtaagcgaatttcaagaactaaagaagggttattttgtcatcatatagatgaagataaaggctatatactttcgcatacaggatgtgcattagaacaaccgtttgagtaccaaaaagcagaacgtctagtttattgtaattatattgaacatttattacttcatatattgattggaaaaaacgctttttggtctaaacatcaaaagttaattgcacctaagcaattttcttatttcattgttccaggtgtttcttatatttgttcagaaataaatttgttgtatgaccaaaatggaagttctgtagaatggagaaataggtgtttaaaaaaaatagaaaacaattttgaagattatatttacatattaaattcatttattcaatatatagtggacaattattctggaaatataaatcaaaaagaaattatggtgggacaacatcttatccacaaagaactgggagaaggcatcattactgatatagatggtgaagaaatattttcggaagtgactattcaatttgcaaattgtaagaaagtcatttatagaaatcagattgataaaggagattatcataaggaaataaggaacattaaagagaaccttgcttctgatacatatagtaatgtgataataaaatctgtatataatcgtttagtagtagagtgaggttaagaaacaaggcgaagccgatacgccgtagggcagtttttgacggagcgtttatagatcgctaacaaaaatttattaaggagtgttgatatgtgtcaggccgtacaggaaatgtgtgatgatgcaagagcagaaggcagaacacaggggtttacagagggtgaaagtattgggcttcagaaacaggcgctgcttacagcatagaaaatgctcaaagacagcagatttacactggaagatatctctaatttttccgggttgccgctggatgagataaagaaattacaaatgaaataacattcttagaattatgtaaacaaaaccaggggattgccaccaagcaatcccctgaaatatttcatatgaaattataaaattatttcgcttcagcttcagcgccttcagcgtcctcatcctcttccggagctgcctcatactcaccgatatgaacaacaactgcatcctcaggagtgatgaagtggacgtgtttgccttccgggatcgggaggtcttttacatggatatcacggacgtctgcaggatagccgttgaagtcgatgacgatggtgtcaagaaggttggacggatctgctttgtagtggatctcttccatctcctgctcaacgataccctgaaccatgtcggtgtgctccagtttgacagcgactgttgtggaaaccttctcaccggctaccagtgcctggaaatccagagccatcagctgtttttcaattggattatagtcaatattttttaccagggcatcaactttttcgccttcgatgtccaggtaaacctgtgtaccttctttatttgctttaatgaatttggctgcctcggcaccgtcaaactgaagtgctacaggctctttcatttcttttccactaagaattcctgtgacgtaaccctcacgtcttaattttttagcttttacattcgggtttcttttctctgctttcaatgtgatcatgtcaaattcctcctcctgatgcatggattccggtaatgttgctgttcgcgctgttcgcagtaacacgaattctgcatttcttttctgactgggattattatagcacttctcggacgaggtggctaacaaaaagttagaaaatttaagaacaatattttgtattgtttaacttatgtacaaaacttcaagggtaaaattagacaaaaacaaagtatatatttgagattttacagaaaaaattaaaacaacataaaaaattgcacaaatcaagtgatcataaaagcctgaaagttggcatttatctggaagagaggcaagtattaaatatgaatattctatttttatttgattcagatatgcgaggagacgggaaatatccatattgctgacatattggagagagctgttgtgatcaatgtaataaaaattggaagatatgatgcaggacagagatgacggcgaaagaaggtggcaacataacacgatgggtattttactctggagaaagaatttaacggaattgcatataatttctgaaacaatttaacatacaattcacaaatctttatctcaatcacgatatctgaacagccggaaaaatactatactacaaactatgtgagcgagagaagagaaaggagataagtaatgtcagaaattgcacttagaaatgtatgtaagcaatttgattcggagcattacggtgtgaaggattttaatcttgatatacatgataaagagtttgtgatctttgtaggtccgtccggatgtggaaaatccaccactttgcgtatcatcgcaggcttggaggagatcacagacggtgagctgtggattgacggtgagctttccaattatctggaaccgaaggagaggggaatgtccatggtgttccagaactatgccttatatccgaacatgacagtttatggaaatatggcatacgccctgaagatccgtaagcttccgaaggatgagatcgacagaaaggtccatgaggtggcaaagatcctggagatcgaccagcttcttgaccggaggccagcggctctttccggtggtcagaaacagcgagttgccattggaagtgcaattatccggaagccgaaagcctttctcatggatgagcccctttccaatctggatgcaaagcttcgtgctcagatgcgtgtggagcttgtgaaattacataaacagctggacaccaccattatttatgtaacgcacgaccaaacagaggccatgactcttgggactaagatcgtggtcatgaaggatggcttgatccagcaggtgggagcgccgcagagtatttatgacaatccggtaaatcttttcgtagcaggcttccttggttctccgtccatgaactttttccggtgtacagtaaaagcagaagaaaataatcgcacggcccttcttctggatgatgccaaaactgtgaaaaaggtttatctggatggaaccagaggaaaacagatcgcagacagatataacggcagacacgtgatccttggaatccgtccggaggatatctacgagctggacgaggcgaaaaagcttggtattgaaaatgaaagcgtagatgtagatgagcctgtagtaaaccgggagatgctgggagcggaagtgatcctctattttgatgagcagggcaaaaccctggcagtccgcttaagtccggaaaatcagacacaggtaggggagaaggtttctctgtattttgatatggagaaggcccatgtgtttgatccggagacagaagaaaatatttttgtgtcatgaatttatgtcacgaaaaagcttgagtgcaggcagatcagcctgtagatagaatctgataggtaattgcgaaactcgctaagttccttagcgatctcgaagcaaatcaggaaagaatgcttgcttttcacggattgtggaatgaaaagagaattcttacacattttaggcgcactttaataagccataggctttatggagttggtaagtcctatgcaatgagaggttttaagctgcgaatgtattcatgatgcttaatcttatgtgcaagaacaacagtaataagctgcgtgattccggaaaggatcagatcagcatgtaaagtcttctcgttttgagttcggcgtcctgcaagacaaagattatccttgatgtgattgatgtctctttcaacaactgttcggattttgtaggtgttgtcccattcttcggttccccggattgttccgggataagcgcgaagatccttttccggatagatgtagaccattcgtccacatttagatgaagtacaaggagtttcacaaaaacattggcgatgtgatttctgggttgctttatcgtaaacccatttcattttaggacaaacgaacttaaaagtaggtattccgctgcgtaagtttgatttactgccctctggcttcattaggagcaatggatcatggggacagcaggggattccgtctttattaatggtataatcctgattttcaagtccggatcttgcattcagagggatataggctttggagaaatgtttgttatcaccaaaagtgttaccagtaagaagattcttatagagttctgcggtatcaaaagctgcatcgccaaggaatgttttcggattgatcagaggatgtctggaaaagaagtccttgagtgttggaatcaagagttttgaatcgtggacacatttatcttcgtcaggggaatcggatttcttttccacaacgatgtcaggatgagaggtcataaaatctttgttataaaaagagatatgacgaatgatgccgagaccattggtaacaatgccgaacttgaagacatagcaaaaatgtccattgatatacagctgcttgatttcaggattggcagaagcatgggaaggcatggaagcgtaggcagccttataaggatcgtaggatttatcaaagcgctgtgctttcgcatatgccttaagctgccgaatgatccgattgacatatttaggattattttcggtaacaaatgcttcaattccggaagaatcgaagatggtcatatctgcttttgcggaatcaatggcctgacagatgggctcggtaatatcaacaagttgatcgaatacgagctgcagatcatctaaaaagtcctgtttgaaacgcgtgattttggaagcatccgggactttggtaaaaccgcagaattcacgaagaggttttgagtaagcgagaaaagtcaggagaagctggtctgtaggaattgagaaaatacgttggatgatcaaagcccacaggaaagcttgcaaggggtatttacgggttctgcccgttgatgcataaaaatgatttctaaaagaaatcggaataatttcatcgatgtcgatatgagtttctaatagggaaagaaatgcaggtttgtcgttttcaaatttttcttggcaatctgaaaaaatatctgccagagaaagctgtttatatggtatcataggtatcagaataactcctttcttggatggcggtttatagtttttggacgactctattataccatatccagtgaggagttatttggttttcaggaacaaaaagtgccgtatttatgcggtttatggcgtttcgcaaacgcctaatagaatctgattatgcaaggaggagaaatagttatggaaaataacagcaaaagcaagatcacaccgtacttatatctggtgccttgtatgcttatttttggaatttttctgttttatccgtttgtgaaaacaatttatttaagtctttacaagaccaacaagatgggacaggcaaagctgtacgttggtctgggcaattataaagagctgcttcagtcagcatcctttatcaacagtttgaaggtgacgctgatctttgtgctgatcgttgtggtcggcggcatgcttcttggtctgatcgcagcagtgctttgtaacaaggcgtttccgggaatccgggtgttcagtacatcctatgctctgccaatggctattgcatccagttctgcggcaatgatcttccagatcatgctccacccggcagtaggtattgtgaataagcttaccggcctggatatcaactggctgaacgatccgaacacggctctgatctgcgtagccattcttactgcgtggctgaacagcgggatcaatttcctgtatttttccgcaggactcgggaatattgatgagaccatttatgagagagcttctgtagatggagccggcagtgtgcagcagtttttcagcctgacgcttccgggactttccccgatcatgttttacacactggtggtaaatatcatacaggcatttcagtcctttggacagatcaagatcctgacagagggtggtcctaatgagtctaccaatgttattgtttattccatttacagggatgcgttttttaactaccgcttcggaagtgcggcagcccagtctgttatcctgtttgtgatcatcatgatcatcacactgatcatgttccgtattgagaagaagggagtgaattactgatgagccagatggaaaatatggcagtcccggcagtgggaaacatgtcaaaagaggagcttctggagctgaaaaaagctatgaatgcaaaggctcttgcaaagagaaggacaagaacagcactccgtgttacggcaaatgttgtgtttgcggttctggtcctgcttccattgctttatgccatcagtattgcactgatgccttccagtgaactgtttactacagagttgaatctctttcccaagaatctgaccttttccaactttatcaatgcattccgcaccgttccacttctccgattcatattgaattcctttatcatggcgggatgcattaccatcggacagatcattacctgttctcttgctgcttttgcgttttctttcctggaattcaaaggaaaaggtattctcttcatggttgtgatggcaaccatgatggttccgggagaggcaacgatcatttccaactacctgactgtatcaagctggggaatgctggatacttatcaggtactgatcgtgccttaccttacatccgcaatgggaattttcctgttccgccagttttacatgactttcccgatctcactgtatgaatcggcaaagcttgacggctgcagcaatctgaaatttatcgtaaggatcctgcttccgctgacaaaatccgctattggcgctatggcagtgtatacctttatcaatgcatggaatatgtacatgtggccgctgcttgtaacaggctccaacaatatgcgaaccgttcagatcggtatcagtatgctggatagtgtggattcacagtccatcaccctgatgatcgcaggcgttgttatgatcatcattccgtccatttccatttttatcgttggacagaaacagctgatcagaggaatgttctcgggtgcagtcaagggctgatatcggagcaggcagcaaccctgcagcatcctgctgtaaggggaaaaataatgcaaaaagatactgcaaagtcgtaagacgggcagttcatcttatataaaaaaatgaaaaaagagaaaatttttcaagaggagaaaaaagttatgaagaaaaaaatcatcgcagctttccttactacagcaatgactatcggttctctttccggagtaactgtattcgccgcagatgccggcacagatgaaaaagtggaaatggcagatgcttccgatgtagacggaactaccattaccttctggcattccatgggtggtgtcaatggcgaggcgatcgatacactggtaaaaaaattcaacgatgagaatgaatacggaattacggtagatgctcagtatcagggtgaatatgatgattccctgaacaagctgaaaagtgcacagatcggaaacatgggtgcggatcttgtacaggtatatgagatcggaacaagattcatgatcgattccggatggatcgtgcctatgcagcagatgatcgacgcagacagctacgatgtatctgagatcgagccgaacctggctgcatactacaccatcgacaatgagctgtactccatgccattcaactcttccacaccgatcatgtattacaacaaggatatgtttgataaagcaggcatcacagaaattccggacagcctggagggcatcggtgagatcggacaggatcttctggacaaaggcggcgcaggcgaggtaatgtctcttggaatctacggatggttcttcgagcagtttatcggaaagcagggacttgagtatgcaaacaacggaaacggacgtaaagaggctgctacagctgttgcttttgacgagaatgatgctgcaaagaatatccttacagcatggaaggatcttaacgacaagggcttcgcaccgatcgtaggaaagggtggcgatgctggtctggcagatttttctgcaggaaaatctgcgatcactcttggctccacagcttccctgaaacagatccttcaggatgtaaacggaaaatttgaggttggtactgcatacttcccgaagatcaaatccagtgacgagggcggtgtttccatcggaggtgcatctctttgggcactgaacaacaatgatccgaaaaagcttcgtgcaacatgggagttcgtaaaattcctgatttctccggagtctcaggcttactggaacgcacagaccggatatttccctgtaactgtaaaagctcaggaagagcaggtatttaaggataatgttgcaaaatatccgcagttccagacagcgatcgaccagcttcatgattcttccgccgactatgtaggcgctctgttaagtgtattcccggaggcaagagctaccgtggaatccgagattgagagcatgctcaacggaaaagaggatgtggatacggctgtgaaaaacatggcagattccatcaacaaatccatcgaagagtataacctggtgaatgaataattcgaaaaggcgtggaaactgaaaaagaaaaataaatatatacagccaaaaatccccgggtaagctcctggggatttttgctatagtcacggaaaaaaacatcctgacaggaaaatatcaggagaaaaatcagaggaatctctggacgtaagagtatatattggctataatgatgaagttaatatctactcctcaggaaggaagaaaaatctgtgaatagaagtaaaagagaagattataagagatttgtggtattttgtctggcaagtctgatcgtaatcgcacaggcagcgatctttgcttatgtatggtatgatttttacagtgacctgatcctgaagccattctggagaaaaggtaactgggtaatgatcctgatctatgcgctgatctatctgatgtttgccaagctttacggaggtctgaaggtaggctatctgaagcgtatcgatgtattttattcattgacgctggcaacgatctgtaccaatgttgtgacgtattttcagatcacactgatcaacagatggtttatgtcggccagaccggtgatcgaaatgaccggagtccagcttgttgtgacggtactgtggatctggggctccaggtatatttactccagactgtacggagccagaaggctgctggtgatctacggagaccgtgatcccggtgatgtgatccacaagatgaacacccgaaaggataaatacgatatcagcggtaaggttcatatccgtgagggcgaagagaagatccatgccatgatggaagattatgaaggcgtgatcatctgggatcttccgtcccagatccgaaacaggtatctgaaatactgtttttctcattccatccgttgctatatgagcccgaagatttccgatatcatcctgcttggaacagacaggatccatctgtttgatacgccgcttctgatgtgcaggaatcagggactttccatggagcagcgtgcagccaagagagttctggatatcattgtttccggacttgggatcatcgtatcctcacccatcatgctgatcattgccattgcggtgaaggcttatgacggcggtccggtattttatctccaggatcgtcttacctatcagggaaaggaattccgcatccggaaattccgaagcatgtgtgtggattccgagaagaacggggcgcgtcttgcatccaagcacgattcccgtatcacaccggtaggacatgttctgcgtaacctgcatctggatgagcttccccagctgtttaacgtgtttatgggtgatatgtctctggtaggtccacgtccggaacgagatgtgatcatgcaggaatatgagcaggaaatcccggaattccactatcgtcttaaggtaaaagccggactgaccggttatgctcaggtatatggcaaatataacaccacaccgtatgataagctgaagctggatctgttttatattgaaaattattcattccttctggatatcaagcttctgtttatgactgtaaagatctttttccagaaagaagtttccgagggcgtggatgataatcagaagaacgctcttaaggattccgaagacaaaaaataagtaacgaaacgaaatgcgtgtcaggctgcggcagatcatcctgacgcgcattttgtggatagagaggacggaggttgtttttatggaaaagccgttggtttccgtagtgatgcccgtatataacggggaaagatatattggaaaagcgatcgaatcagcactgggacaggaggttccggtagaagtgctggtcattgatgactgttctgcagacggcacagaacttgctgtaatgaaatatatggacagcggaaagatccgttatatccaaaatgaacagaatatgggggctgcccgttccagaaaccggggcgtaaaggaagcccggggaaaatatatcgcatttctggatgcggatgactggtgggaaaagggcaagctgaaagcccagacagaggttatggaacagaccggctgtgcgatctgctccaccggaagagagctgatgacgccggatgggcgcactaccagcaaatatattccggtaaaggaacggatcacatacagggagcttctgaagcataacagcatcaactgttcttccgtattgctgcgcagagaagatgcacttgcgtttccaatggaacatgatgacagccatgaagattacattacctggctccggatcctgagaaagggaggatttgcagcagggatcaacagaccttacctgaaataccggctcagtgaagggggaaaatccagaaataagctgaagtctgcggcaatgacttatcaggtgtatcggtatgtgggatatggtccgctgaagagtctgtttttctttgtttcctatgcgctccacgggatatggaaataccgttgaaaaattctggaagaggtgaataattctgacatatattaattctttatttccaaattcataaatatatgttattatttattcatacttttatcaaatattacaaggtggaaacaaatgaaacagagaacggatagccagggagttccgtattcttacctggtcgataacattaaagtagtactgatctttcttgtcgtatttaatcatctgatcgcatttcagctggtcaaggtggacatggtggtgcgttatgtatggtatgggatcaccatttttcacatgcctgcttttatttttatatctggatatctttccaagaagccacaggatgtactgaagaatgtgaagaatctgctgatcccttatattcttggatacagtctgacctggtatgcttatatctggaccggcagaagcatggattatgagctgctccgtccgtccggaacagttatgtggtatgtgttggcactgtttatctacaggctgactatcgaagcacttggcaagatacgttttatcgtgcctctgagcattatttttgcattgtgggcaggaacaagaccggaatttacgacttatctttcaagctccaggattgttgtattttttccgttttttgtggcaggctatctgtggaagagtgattacacagacgtggtccgtaaattcaagggtaaatggatcctgctcctggtttcagccctgcttttgtatgcagttccgaattttatgatcgccaatgagatcccggtagatattttccgtgggaatcatacgtatcagttatcgggaatggatgatatcacaggaatgctgatccgccttctgatgtatctggtatcttttgtgctggtgctgacgtttctggcattgatcccggatgtgaagctgccggttacctttgttggaagaaataccatggggatttattttttccattatccgatcatgatcgtactcaacggcctgcttcttctcagcatcccgcagatgctgaatgtctgggtgcttttcggagtatcctgggtgcttgtgctgatccttggaagcaagccggtatctttcctctacggaggggtactaaacctgcttacatttattctgttcaaacgtgagaggcaggtgcaggatgaaggacttgaggatgaatatgatgaagatgaccgttatgagatcatactgaaaagaaagaaagccattgaggagcttgcggcaactctggacgaggaggatgcacgtaaggtgaaggacgatgtggcggctgtactggaacatgagacagaagagacggaagaaatccgtgacgaggatttctttgtagatgaggatcttgagatggaggaaggcatggatgatgccggagctccacaggaatttgagcagctccaggacctggatgatatattagagatcacagaaccgcaggggggaatggaagtgcttttgaaaaataaagaagagaaagcgcaggattaaattaataatgaaaaaagtcattacttacggtacctttgatctgttccaccagggacattacaatattctgaaaagagccagggagctgggggattatcttgttgtgggtgtcaccagtgaaagctatgatatcgaacgcggcaagctgaatgtacaggacagccttctgaagcgtatcgaaaatgtccgtaagactggttttgcggatgagatcattgtagaggaatatcaggggcagaagctaaatgacattacaaaatacaatatcgaccttctggtagtcggttcagactggcgtggcaaatttgattatctgaagaattactgtgaggtcgtttatctggaacgtaccaaaaatatttccagtaccaagctcagaagtgagggtatgatctacagcatgggcattgttacggatgatgcagaggacaacgaaatggtgatggagtccaagtatgtcagcggactgcatgtagaaagtgtgtattccgaggacgtttttgttgcgagagaattctgtgacagatacgaacttgactcttatggtacagattacggacagtttctggaaggattggatatcatttatatccgatccggtctgaaaaacagggcagattatatccgaaaggcactggaatgtgataaatatgtgatcagtgacacgcctatggctctggagccggaagagataagagagctgtttgcactggcaaaggcacatcaggttgttctggtagagaggcttaccatggtctatctgcgcgcgtttacgcagctcgtctggctgacacatggagcacttgtgggagatgtggtagctgtaaaatgcgcgatttctcaggatgattttgagggcggaaagaatttcagcgaaacagtcagccaggcgctttgtgcatgtatcaagcttctcggtaaggattacctggatgtgaagaccaatgcgatgaagagcagtgacggctgctttatttatgatatgatcacgataaagtatctccgggcactggcgaccattgagatcggaacaacggtggatgtggaaaacgagcttgcaatcatcggaaccagggggcgtatcaccgtacccggtgactggtggaataccggatattttgaagccaaaatagaaggtcaggaattcctgaaacgctacagctttaattttgagggaaatggtcttcgctatctgcttcaggagctggtcatcatgattcgtgacagacggacagaatgtacgagatttttttatgaagaatcagaaactctggctgagcttttgaaaataattaatcaaagaggttgacagatgacagaaaaacagaagcttcttttgcagctcttccgggaggttgacgcgatctgcaaaaagcatgatcttagatatgtaatggccggaggtactctgatcggtgttcttcgaaatgaaggctttatcccatgggacgatgatgtggacatttacatgcccaaaagtgactgggataaatttgtagaaatatgtcagaacgagatgccgccgaaccgggcggtttattgtgcagaagtggatcgtaattataccaacggttttccgcgctacggaagtacggatacctgtgcgatccacaagcatcagatcataggggacgacaaggctggtgagatcattgacgtactgactctggatcccattccggatgatgaccgtgagtatgagaaataccgggaccatatgatgatctatacggaacttctgaatatcagcatggtcgtgggagtcagatgggaaatttctccctggcggtatctgtactggcttttccgctataccttctgcggaaaggacagaaccttaaagaaattggagaagatcatgttttcttataaagaagaggagtgcagccgctatgccatgcgatggggaggctgcccgtttctttttgacaaggatatgatgttccctgtaaaatatatggacttcgagggcgaaaaggttatgatccctcacaggaccagtgattatctgatctggcattacggggacgaatggtcctatataccgcctcatggggaaagagaatctcatgagtctgttgatgttccgggcgccagctatcaggaggtgcgggatgaatatatgccaaggatcgacaaaaaacgtatccgcagacagatgctttttcgcaaattctactgccttcttatggcaaagggagaccataaacaggatgacagacgaagaaggatcaaagccggtgttgtagcccgggatgtgtctgcccggctgatgagatccgaaaaaacagcggagaccctgctgaaagagagaagatatgatgtgcttggtgagatctttgaggagtattaccgtgtacagctcagcatggagtttatcgggcgtgaggattttaacgggatccgtccgttctatcatccgatcctgatcccgctggaggataaggcttttcaggcggccatgctgacactgatctatcaggagcgtgtttccaaggcataccgtatgtacgaggtacgcaagaaaatggatcatcttactccggaaatggagcagacagtggaggatatccgccgtttccgaaaagcagccagccactatgaatttaaagaaatgcaggaagcagaggcaatcgtggatgatcttctcagaaaatatccggatgctccgggattcctgaaatttaaatgccggtttgtgatggagcgcctggaaggaccgcagaatgcttcggaagcggagaaatttctgtcttactgcctgagagtatttccccaggatggatattttatgaaatataagggggatcttctctggaaaaagggcctccggaacgaagcaatggcagagtatctgaaagccagagaatgcaccaataatggcattgtgcagctggaactggataaattcctgaaaaaacagaagtcccaggcgatccgggactgtcgggatctgcttgtaagccagagaagatcagaagcactctctctgatggaattttggagcagactgatgccggaggatgaggagatcagaggcgctctttatcttgcgaaggtatattccgtccgtacaaaaggggagctggaagagctggtgagagagctttgtaaagaactggggatcaccggtaattctccaagggagggaacccttgaggagccagtgtacaaagaggcacttacctgtgcatggcagagattcggctatcccaaagcactggcagagggccgtaccaggatcctgtgcagtgaggaagagggcgagatggaatatctggcagaggagatccgcagctttctggtccataaggaatggcagggagaggtatacaagcttctgggagatatccggaagaaacaggggcgtacccgggaagccttcgaaaattatttctttgcattggatcatgagccgcatccctatataaaaaatgagctttccaggatcttcctggaggatctttacgatggaagccggcgtaccggatttttcgcaaagaaggcagacgtgacagaatttctgaacagctggttggataagtataaaagtcaggaggaacttcagaagcttctgaagcggatcctgtaatgacagatcaacagaaacgaggcagagtgtattgaacagagaacagcagaaagtactggaacttctaaaagaaatagataccatatgcagaaaaaataagatcacatattatctttctccgtatcttaccctctgtgcggtaacggagcgcccttttcccatgaatccggcaagcaatgatatttatatgaagaccggtgatatggcccggtttaaaaacatctttgacgaagaaccggagctgcgcagagctctggaatctatggagaataacagccgtttccccggattttttctgcgttatacagataaagatacattgttttataagctggacgagtatggaaaatacaaacatccgggactggggatcaatatccttccgctgcagtgtgaatatggtccaaagggaaaatatctctggaaccgtatgcgcgaagagggatggaagaggatctacggaaaaaaaggcaagtggcggaaccggcgtgagctgggatgtatctggatggtgcgagtcctttccctttgcggacgaggctggctggcaaagagcatattccgggatctgctccggcagccgcaggatggcgcaaaaacctatgtactccgatattttgaccagaatctttattttcctgcgcatatttttgaaaatcccggggaggcaatgcttggaggagaatcctttatggtcccgggaaacacagacagctatctcacccgggcctacggcaaaaattatcgaaataagtcaatggaaaactatgttcccggctcgctggtggtgtgcagcacactgatcccatgcgaggaatttctgcagcagtcaaaggaactgaagaaatttgcttctgtcaggaagaaaagggaaaagcgcaggcagtttggaatgaattaccgggaatatcttgcacagtgctgggattatgcaaaattctgcggggaaaaatatacctgtgcactggcttatcgcaaaaagctcagctatatccggaatctcttcaaaaatgaagattatgtggaactggaaaaagcatttgcgggatataccaggatgaacgatcgctgtctgaaatatgaagaagcatttgaaacagatccggaggtttttgacctgtatcttaagtatctggaaaaaacaggaaggatctcgtatatggagaaggtaaaaaaatatgtctaaggtcaagcttacagattatgttgtggaatttttgcagaaaaaagggatccatgatttctttggataccagggaaccatgatcgcacatctggtagattccattgagaagaatccccatgcaagaagtcattccagctatcatgagcagggagctgcttttgccgcctgtggttatgctcaggcaaagaatgcctgcggctgtgcctatgccaccagtggtccgggagctgccaatctgctttccggtgtggcagatgcgtatttcgattctcttccggtgatctttatcaccggacagctgaatacctatgaatattccggtattacaggccttcgtcagcagggttttcaggagatcgatatggtttccatggcaaagccggtaaccaagtacgcggtgcaggtccgtgatccgaaaaatatcgttcgtgaactgaatcttgcatggcagatcgccaatacaggtcgaaagggaccggttcttatcgatcttcccatgaacgtgcagagaggcgaggtggaagatccggtttatgatatggaattttccgaggaagagatcgagacagctgtatatggaaaaaatgatccggaaaacggggcagccttttacagggatgcagttgcaaaggcggattcttctgatggagcagaggcggcagaatatattctgaataagatcaggactgcaaaacggccggtatttatgatcggtcacggagcttccggagaagcagaaaaaatgctcacagatctggcgcgtgcccatcacattccggtgatcacaagcgtacttgcccggtccgcactgagttttgatgatcctttgaacttcgggtgcatcggaggtgcctacggacaccggtatgcaaatatgatcgccaatgcaaaaagcgaccttctgctctgctttggaatttccctgtgtacccgtcagattggtactaaggttcatgagtttgcgaagaatgccgaaatcatccgtgtggatattgatccttataatcttcaaagagagatccatgagggaagagaaggtgagaaatgcttttgcgtcagcgcagagactgtggtgcgtaagctgacagagcagcaggcacagatcggttcctatgaggaatggcttgctgtctgccagaagatccgtaaggaactctggaaagtggacgatgagacaccgcagcgttatccgaatcgcatgatcgcatacttgagtgatcagctttccgataccggagcggttgctgtggatgtgggacagcatatggtctggagctatcagtccttccacaatcagcaggggcagaagacacttttttccggcggacatggtgctatgggatatgcacttccggcggctatcggagcttattatgctaccggcaagccggtggcatgtatctgtggagacggagccttccagatgaatatccaggagctgcagtgggtgaagcgcgagaatatcccggtgaagatgatcgtaatgaataatgaggcgctgggaatgatccgtcatcttcagagagattattttgactgtgtatatgcggatacctccgatggcagcggattctcgtcctgcgattttacagatgtggcgcaggcttacggaattcctgcaaagcgcatccagggagaagacgtggaaaaatatgccggtggattcctggagcagaacggaccggagcttctggagatcatgctggagcatggaacctacgcatacccgaagacctgtctgggtgagccgatccacaatcagcagccttatataccgaaaccgatatttgatgaactgatggagctgtaaaatgggaaaaataactgtgatcacaggcggtacctccggaattggaagaggaattgccgaaaagatcctggcagagtcggcaaaaactgacaggatcttcgtaacatatggacatgatgagaagaaggcactgtcgtttcaggagagccttcctgaggaaaaaagatctcaggtgactttgataaaggcagatatgtcttcctatgaagagatgatggtttttgtggaggagctgaaaaagcagacagaccatattgactggcttgtaagcaatgccggcatcagcacctacgcaaaatatgaagactacagctttgaggagtggacacggatcgtaaacaccaatctttccgtacctgtatttatggtcaaagagctgagatccatgatggtggagggcggcagtgtgctctttaccggttcctatgcaggacagcaggcgtattcttcctcccttgtatatggagtcaccaaggcagccatccatttcctgacaagatccctggtaaaggaatttgagccaaagggcatcacagtcaacgctattgcacctggcttcatcgaaactccgtggcacagcgcccgcacccaggagagctacgaccgtatcaaccggaagatcgcactccacaggtttggaactgtggaggaagtggcggatatggcttatgcagtgctgtctaacggatatatgaacggcagtgtggtggatatccacggtggttatgactacttttaatagaagttgaaagtgtgcaggaagacagaagaagacatgttgtgcctgcacataagggtcttcttattactttctgtacaggggcgacgtcccgaaaacgaaatgcagcgaagcagaatcgggtttgcgcacttgagacgtccgtacggaatctgtgaaattctttatatttaagcgaaaaaggcttgacttgcacacctgctctgtgataaaattgacgagcgacatggaagttaggtcttttttttatgcccgaaaatgacgacggatatacgttccgggcggcatagaagaccatgcaaatgaaaacactggaggtggaagttgtgcgcgttaagattacattagcatgcaccgagtgcaagcagcgtaactacaatatgacgaaggagaaaaagaaccatcctgagagaatggagaccaagaaatattgtaagttctgtcatacacacactctgcacaaggaaacaaagtaatcacagagatttgtgaggttatgctatggaaaaacagaaatctgaggataagccgcagaagaaaagttggtttcagggacttcagtcagaatttgagaagattgtctggacagaccgtcccacactggcaaagcagactgttgtggtcgtgatcatcacgatcatcctggcagtggttatcagtgtaatggattccggaattctggaatgcattaatttcttaatgaagtaaggacaaggtgattatatgtcagaagcagcaaaatggtacgttgtccatacctattccgggtatgagaacaaggtaaaagccaacattgaaaagacgatcgagaacagacacctggaagaccagatcctggaggtacgtgttccgctgcaggatgtagtggagatgaagaacggaacctcaagacaggttcagaaaaagatgtttccaggctatgtgcttctcaatatggtgatgaatgacgatacctggtacgttgtccgtaatacccgcggtgttacaggattcgtaggaccaggatcaaagcctgtgcctcttacagaagaggaaatgatgccgcttggtatccagaaaccggatatcgaagtggacttcgcagagggcgacatggtagtcgttaccggtggtgcatggaaagataccgcaggtgtgatcacaggtatcaacatgcagaaacagacggtaacgatcaatgttgagcttttcggtcgtgaaacaccggtagaaataagtttcacagaaatcaaaaaagctgagtaattcaaaaacaaggtaacagcaagtgggagggacacacccccgccaataccacataggaggtgccgaaaatggcaaagaaagtaacaggatatatcaaattacagattccggctggtaaagcaactccagcaccacctgtaggtccggctcttggacagcatggtgtaaacatcgtacagtttactaaggagttcaacgcaagaacagctgatcagggagatcttatcatcccggttgtcatcactgtttacgctgacagaagtttcagcttcataaccaagactccgccggcagcagttcttcttaagaaagctgcaaacatcaaatctggttccggtacaccgaacaagaccaaagtagctaaagttactaaggcacaggttcaggagatcgctgagctgaagatgaaagacctcaatgcagcatccatcgaggctgctatgagcatgatcgccggtacagcaagaagtatgggaatcgaagtcgtagactaataaataccgaagcttaagttcggggttcccgtagaaaaagtgaaattttcaagtgggagggcttttccccgcaaataccacaggaggttatagaaatgaaacgaggaaagaaatatgtggaagctgcgaaagcagtagaccgcgcaacattatatgatgcaccagaggctatcagccttgttaaaaaagcagctgtagctaagttcgacgagaccatcgaagttcacatccgtacaggctgcgatggacgtcacgcagatcagcagatccgtggagcagttgttctgccacacggaacaggtaaaaaagttcgtgtacttgtatttgctaaagatgctaaggcagaagaggcaaaggcagcaggagcagacttcgtaggagctgaggacctcattccgaagatccagaacgagggatggcttgactttgacgttgtagttgcaacaccggatatgatgggcgttgtaggtcgtcttggtcgtgtacttggaccgaaaggtttaatgccaaacccgaaagctggtactgtaacaatggacgtaacaaaagctgttaacgacattaaagcaggtaagatcgagtatcgtcttgacaaatccaacatcatccatgttccgatcggaaaggcttcctttaccgaggagcagttaagcgacaacttccagacgcttatgggagctatcacaaaggctagacctagcacactgaaaggtcagtatctgaagagcgttacaatcgctccgacaatgggacctggtgttaagcttaacccgattaaattagctcagtaataaattttaaataccctgtacagaggaaactttgtatggggtatttttttatacatttatacaccttgattttttggggcaaaaatcctacaataaggcacaaacagagttgtaacagaccgaaagctcatcagagctttttcatatagattttacagaagacaataataatcatgttaatataaaaaagatggggaaaacgtttctgtaagtaaaacttacagatgaatttgtcggaacagggagtataaattgagatcaaaaaagcgtaaagcgaagaaaataaaaaaacaggtaaacaaaataaaaatgatactctgcctggtggtagaggctatcgtgatcctgacacttatagtgatcatcggctggaataaaggggtaggtgactggatggagtctctgcagagaccggttgtccgtaagcttgagatgagcggtatcaacagtccctacgcagtgctgatgcaggtaaaaggcggaaagatcatcggaaatatgaagggcgatgagaagatctatccggcttccatgacgaagatcatgacggtgatcgtggctattgagaacctggatgatctggatcaggagatcactctgacccaggaaatgttccaggggctttatgagcaggatgccacccaggcaggctttcagcccggtgagaccgtgcgggccatcgaccttctttatggtgccatgctgccatccggtgcggagtgctgtatcgcactggcggataccgtaggcggttccagggatggatttgtggagctgatgaataagaaggcacagaggattggaatgaatggtacacatttctgtgatacgacagggcttcatgatccggatcattacagtacagtgagagatattgcggtgttgctcaggtatgcgcttcggaacgatacgttcagagagatcattgagagtccgcggcattccacaggagtgacgaatatccatcccagcgggatcacatattacagtaccatgttcaaaaatctttctgacccttccgttaccggcggcaagatcctgggcggcaagacaggatataccagcgaggcgggtctgtgtcttgcaagctttgcagaggtctacgacagggaatacatactggtaacggcaggcgcatcgggaaataccggaagcccactccatgtggaggatgcggtgacgatttataaccgccttggaaaggccattgaggcacagatgacaggcagtgatggatcggagtcttgaaaagataaaggataaattttgtgtatcgcgaagcgtgttgcagagaacggagtgaacagtaatatttttggataaataaacactggcacagaggtgtatgctgctgtattggcagcataacacttctgtgccgtttttttgattcttcaaaatgaaatcgtatagcgggaacctgcaatgtattcacggctgatgtaaagcggttttccatcaggagcttccatataggaatccaggatcagcacgggatcgccggaagacagacgcaaagtttttgccatatccggggaggctgcagtaacagaaatagtgctgcggctggattctgcgatcgtacagcggtaggtgtttttgatatattcaaaaaaagaaccgttttctacagcgttcggatcaaaatccgggaaaagccgtgtggggagccaggtgtgaacatcaataaccggaatactgtcagccagaagaagacgttccaggaaaaaaacttcctcatccgaagtaagctgcagaaaatcagaggttacgctgttcgcaggttttttgcagaaggacagtacgtgagattccggaatacggttattctgacggcaggattcggaaaagctcatatttttctgggattcaaatttccggaagatcatgggggattttacaaaggttccttttccctgatgcttgataagatagccctgcgtgcaaagctcctccacggtacgtcggacagtgatccggctgacatggtaaagatcggcaagctccggctcaggagggattttttctccgggcttataagtaccgtttttgatctgctgggtgatgatatccataagctgcttgtaaagcggctggatcgaatttttatttaacatgaaaatatcctttctgaggttgttcataaaagatattttactatagtgcggatgtatttgtccagtaatggacaaacctctgcagtgcgtcagaaagtatattggatgaataattaatcataaatcatgaatatactctttactataacgttataatatgttatattcttcaaaaaggtaaaatgcaaaagtacaagaaggagaaattcatctgaaaatccgaaaaaacctgtattttcaatggattcagaggattctcagacgaatttccacgaaaaccggaggatgaaaatggacgcagtaaaaatcgtaaataagatcaacaaagagcatggaacaatcaaaaatgtgtattttcttgcatgcggaggatctcttgtggatctgtatccgggatattattttgtccgtgcggaatccgcagtgatgaatgcacagtggatccctgcaagagagtttgcactgacaccgccgaagaagctgggaaaagacagccttctgatcatctgctcccacagtggcaagacaaaggagtgtctggaggcagcaaaaacaggaatggatgcaggtgcggctgttgttacaatgacacatgcgccaggttccccatgtgataccgataaatggatctccgttgtatacgactgggcaccgggggtaaaggaagcagagaagcctcagggaatcgtacttcgtattcttaatgagctgatgaaggtacaggagccgggatataagctttacgataagatcgtggaaggctttgaaaagatcgatgatgttattgcagctgcagtgaaggatcagcagaatgcagcatggctttttgcagaaaaatattcagaggaaccgaacctttatatcatggcatcaggagcctcctattctcaggcatatggctttgcgatctgctcacttcaggaaatgcagtggatggattgcggatatctgaacagtgcggaatatttccacggaccgtttgaggtaacggatgaggatcatctttatatccttatgatgagccggggcagaaaccgtatgatggatgagcgtgtgctgactttccttgaaaaatacggaaagaaatacgaagtgatcgatgcggataagcttggtatggaagcaattgatgacagctgcgtggaatattttaccccgatgctgttctacaccatgacgaccgtttaccgtaccgctctccaggataaacgccgtcatccgctggatatgagaagatatatgggcgttgtagagtactaaaggtgctgctgtgcctgtgcacagagaaagggaaaatatgagtaaatacagtacaaagcttcttggcttcggagacaatgtagtggatatctatgatcatctgaaaaccatgtatccaggcggaaactgcgtaaacgtcagtgtttacggaaagatggccggatgtgaaaaaacagcgtatatgggatatttcggagatgacgacagagcagagctgatcatggatacactggaaaaaatcggcgtggaaaccgtaaagtgcagacagctgcacggcgagaacggttattccaggatcacattaaaagacggagaccgtgagttcctggattttaatgatggtggtatccgtggaaaaacaccgtatatccttgatcgttttgatctgaaatatatgaaaggctttgatgtggtacatagcggaaattactcttttacggaggaagagctgcataagatcaaagaggcgggaattccggtttcttttgacttttccgatgattccacagaggaatattatgaaaaaacagcaccggaggttacttacgcattttgctcctttgacggaaccgaccaggaggcagaagagcatctgaaaaagatcatctccatggggccgaagcttgccatggcctccagaggagccaggggctgcattctttatgacggaaggaatttttaccgacagccggcagcgccgcttacggaagtaaaagatactcttggcgccggggattcactgatcgcatctttccttaccgggtatatcggaagaatgaaaaatggcatggcggaggaaaccgcgatctgtgaaagtcttgaagaggcagctacttttgcagcgggcatttgtggcatggaaggtgcttttggctacggaaaaaaatatgaatagcaggaggggaaaataatgggacgcaatggaaaaagcagagctcttatctgttttgtactgtgtatgatcatggctctgcctgtatatttcagcagtgcagtggcagtaaaagcggcagaacagcagaccatcatcataggaacgaacgcagagtattcaccatttgaatacctggatgataatggaaatattacaggttttgattacgatcttctggaggcgatcgccaaggaagaaaacgtaaagctggtatggaaggatatgccctttgattccctgatgggttccatggaggctggtgatgtacaggtgatcgcagccgggatcggacctacggaggaccgtaaaaaaagcgttgatttttccgatgtttattacaccggtacacagtgcatcatcagtcgtaaggataatccgatcaaggattttgaggagatgtccggaaaaaccgttgcagttctggagggtgcacagagtgatatgatcgcatccggcgagactactgattacggtgaagttaaggatgccaaagtaaaaagatttaaaaacgcttccagtgcagtcatggagctgaaaaacggtggagcagatgcagttctgatcgacaatatcatggctgagatctactgcaaacagaactcagacctgcagtatgagtccgtgccaagtacagcagaggatactgttttctgtattgaaaaaggaaacacagagcttgtccagatcatcaatgacgggcttgcaaaagtaaaaaaatccggggaatatgatgatctttatcagaagtattttgtggacacacttgaaaacagcgaggatgtgacagatgtagcagcaaccgatggttttctgggacttttaagctttattttccttcaggataatcgttggaaattttatattaacggtcttgggattacgctgatcgtttcccttctgtcagtgatcgtaggtatcctgatcggtcttgtagtggcattggtacgtcttggagctgcgaaaaaaggcagaagaaccattctttccacgatcgcggatatttatgttgatgtgatccgtggaacaccgtcagtccttcagctgatgatcatctattttgcagtgttccacagcaggctgggatatgtggcagcagtggtcagcttcggtatcaacagcggtgcatatgtttccgaggttatccgcggaggtattttatctgtagacaagggccagagtgaggcaggtcgttctctgggccttgggtataaagataccatgcgtttcattatcattccgcaggctgtaaaaaccatccttccggcaatgggtaatgagtttatccagctgatcaaagaaacatctattttaggttatgtaggtatcatggatctgacaaaagcggcaagctatgtttcttcccgtacttatcagatgtttattccgctgatcgttgcaggtatcatgtattatctgatcgtgaagtgcctgagccttctgctgaagagatttgaaaggagactgagagaaagtgattgatgttaaaaatctgaaaaagtccttcggggacgtacatgtattaaagggaatcacaactcacgtaaacaagggtgagtgtatctgcatcatcggtccgtccggctccggaaaatctacatttctgcgctgtctgaaccttctggaaaaaccggaggaaggcgagatcaccgtaaacggacagcaacttctggatccgaagctggatgtagataaattcagggaaaatgtgggaatggtttttcagcattttaatctgtttccaaatatgacagtattgaaaaatatcacccttgcgccggtgcgccttggcaaatggaatgtagcggaagctgatcagaaggcgagggctcttttgaaaagagtcggacttgaagaaaaagccgatgtctatccaggaaagctttcaggcggacagaagcagagggttgccattgccagagcccttgcaatgaatccccaggtgcttctgttcgacgagccgacatcagctcttgatccggagatggtcggagaggttcttgaggttatgaaggagcttgcaaaagaaggcatgaccatgctggtggttacccatgagatgggatttgcaagggaggtcagcgacagagtgctctttatggatgatggggtgattcttgaggatagaaatccgaaagaactgtttggggatcctcgagaggaaaggacgaaggagtttctttccaaagtgttgtagtttttttggtaaaaaagttttgttttgaaaaaacggggaaattcgtggggaggggaggcactcggagttgcgaagcccgtttcccctccccacaccccacccctccgggcacgccgctgtgctacgccttggagtgtgttaatttatcggcttagtcctgtatgctgctgtattggcagtgtcaggctgagccgatttttatttcgtcggacggaaaagcggcccgcgcagcggacctgttccctgttgttaacgggagcgggtttatgccagtgatgcgacaacagacggaagcgggtgagcgtcggcaatacaacaacagacagaagtaggtctatgccagtgatgcgacaacagacgtgagcaagtgagcgccggcaatacagcaacaggcagaagtaggtctatgccagtgatgcgacagacgggagcaagtgagcgccgtcaatacagcgacaggcaggagcaggtcagcaccagcaatacaataggcaggagcagattagcaccagcaatacaacaggcaggagcagattagcgccagcaatagaacaacaggcaggagcagattagcgccagcaatacaacaaccaccaggaacaggtctgctgcgcagaccgccttccgtccggcggaacaaaaaaatcggctcagcctgacgctaccaatacagcagcatacaggcatttaccaatacactaccccataccacagcgtagaacagcgacgtgcccggaaagggggagcgcgagggggaaaagcgggcttcgtaactccgagcgcctttccccctcgcaaacctgcccacgccaaagtgtccctccgaaagggaaagagctccactgcccaaagtgtccccccccctggaaagaaactatccgtcagaagacacaggctctccgccaggagcgtccgtcagacgcccgacattgtacaatatctggtacaattttctcattatttttatcaataatacaattacatgtatattataaagaacatacttccaagctgttgactttaaattcggaatctgttatcttatggtcgtcatgagaaatgttatatattactaactgcgcggacagtgaacgaaatattgagacaacaggaaaggatgtgtaacaaattggcaaaagttgattttgaacagtggaatggttttaagggtgatcgttggaaagagaagatcgatgttcgtaatttcatcggtatgaactatacaccatatgatggagatgcttccttcctggaagagccaacagaggcaacagacaaactctggggcaagcttcaggaacttcagaaagaggagcgtgcaaaaggcggcgttcttgatatggagacagaggtagttacaggtatcacagcatatggtcctggatacatcgatgaggagctcaaagatcttgagcaggttgtaggtcttcagacagacaaacctctgaaacgtgctttcatgccatacggcggaatcaaaatggcagagcaggcatgtgagacttacggataccatgtaagcgacaagatcaaagatgtttttaacaactatgagttcaaaacacacaaccagggtgtattcgatatctacacaccggagatgaagagagcacgtcacaacaagatccttacaggacttccggatacttacggacgtggacgtatcgtaggtgattacagacgagtagctctttacggaatcgatcatctgatcgcatgcaaggagagagatttcgcagcatgcgaccgtcagggtatgagacgttatgacttccagcttcgtgaggagatcgcagatcagatccgtgctctgaagaagatgaaagaaatggctcagatctatggctttgatatttcccagccggctaagaacgcaaaggaagcattccagtggctgtactttggatatcttgcagcgatcaaaactcagaacggagctgcaatgagtgttggacgtatctccacattccttgatatctatattgagagagaccttgagaacggaactcttacagagaaagaggcacaggagcttgttgaccatatcgtaatgaaattccgtatggttaaattcgctcgtatcccgtcttacaaccagctcttctccggtgacccggtatgggcaactctggaagtagcaggtatgggacaggacggacgttccatggtaacaaagaacgactatcgtttccttcatacacttgaggatatgggaccggctccggagccgaaccttacagttctctactcctcaagactgcctgagaacttcaagaaatatgcagcagacatctctgttacaacaagttccatccagtatgagaacgatgatgttatgcgtccggtatggggcgatgactacagcatctgctgctgtgtatctgctacagagaccggtaaagagatgcagttcttcggtgctcgtgcaaaccttgcaaaatgccttctttacgcgatcaacggtggtgttgatgagaagacaaaacagcaggtaggaccgcagtaccagccgatcacttccgagtatcttgactatgatgaggtaatcgcaaaatatgatcagatgatggactggcttgcacatctgtatgttggaacactgaatatgatccactacatgcatgataaatactactatgaggcagctgagatggcacttatcgatacaaaggttgaccgttccttcgcaacaggtatcgccggattctcacacgtagtagattccctttccgctatcaaatatgcaaaagtaaaagcaatccgtgacgaggacggaatcacaacagacttccaggttgagggtgacttcccacgttatggtaacgatgatgacagagcagacgagatcgcaacaactctgctttccacattccttgagaaactgaaacacatccatacctatcgtgattccaagccaaccacatccatccttaccatcacatccaacgttgtttatggtaaagctacaggatctcttccggacggaagaaaagccggcgagcctctggcaccgggagcaaacccgtcttacggcgcagagcagaacggacttcttgcttccctgaactctgttgcaaagcttgactatgaggatgcccttgacggaatctccaatactcagacgatcaacccggatgcacttggccattctgaggaagagcgtacagagaatcttgtaaatgtacttgacggatactttgaccgtggtgcacatcacctcaatgtaaacgtattcggtaaagagaaacttatcgatgctatggagcatccggaaaaagaagagtatgcaaacttcacgatccgtgtttccggatacgctgttaagttcatcgaccttacaagagagcagcagcttgacgttatcgcaagaacctgccacgaaaggatgtaataaaaaatatggacgaccagaaaaaaatcactggctacgtccactcactggagagcttcggctctgttgacggaccaggagtccggtatgtgatctttttgagcggctgcgccatgcgctgtcagttctgccacaatccggacacctggcaaatgaaaacagggacggagtacacagcagatgagctgcttgaaaaagcctgtcgataccgctcttactggggaagtaagggcggtattactgtgagtggaggcgagccactgttacagatcgatttcctcactgagctgttcagaaaagcaaaaaaacttgggattcacacaacacttgataccagcggcaacccttacacagaagagggtccgtggtatgaaaaatgggaagagttgatgaagtacacagatcttgtcatgctggatatcaagcacattgatgaggaacagcataagatcctcacaggatgtaccaataaaaatattcttgccatggcccggaagctttccgatatgggcgtatccatgtggatccgtcacgtactggttccggaacgcaatgaccgggatgactatctccaccggctggctgactttattgcaacactgaagacagttgagagagtggaggttcttccatatcacacactcggaacctttaaatgggaaaatctgcatattgattatccgctgaagggaattgatccgccaacgaaagaacgtatcgaaaatgcggaaaaaatcctgggagcaggtacacagtaataaaaaaaccatatcttatgtcgaaaaacagacatagatatggtttttttgatgttcacaccagttctttgtttttgatcagcatttctttgatgatatcctgtgtataggaacctaagcggcgctgagtatcccggtcaagctctgaaggaatgataggcttgccatattcgatcactacgtgtgtaggtgtcatcttcgggaaattggcctcccagatattggcagagttgctgatcgcaataggaatgatcgggcttttggctctggctgcgatcttgaagctgccgtcatggaaaggcagcatttctgtttcatcagcattcttatttctggttccttccgggaagatacatacggaaatgccggatttcacatagtctgcggcctgaaggatcgttttcagaccctgcttgatatcctctctgtcgagaaagagacagtagagattgcgcatccagttggagagcagcggataatgctccatttccttcttggcaacatagccggtgcggatcggacagcggctgtaggtgagcaggatgtcgaaatagctccggtggtttgctacatagagaacagcctgatcctttggaacgttttcttcgccgatgacggtgactttggcgcctgtgatccacaggatgaatttgaatatggcctgtaccatgcgcagagagctgatatccttagtcatgggagaaaatttcccgatgatccattctacaaggagaaccggaatggtcagcaccagataggcgatcaccacgatacagacaagtatgaatcgaatcatgtcttttgtcctttctgttatagatacttgcggagagttccgcagtaagatggtatttttatattatacgaagaaaatccgatagttgcaataaatctttccctgctcacatagaataaatactgaataatggttactgtttactggtgatcttccgcaaagcgtgttactgagaacggagtgaacagtaacgaatcatgcaggtggcttatattatgaaaaaagcagtatttctgcggatcgtgctgacagctgccgtgctggcactgctgctttctgggtgtcgatttgtccgggtggaggaagaagaacgaaaaccggtagattacatcgttgtggaacgcagggatatcccggaggagctttccaggcttatggaagaaaaaaaggaaaaggaatttcagctgagttatgaaaccggagaggatctttacctggccaaagggtacgggcggcagatgagtggcggatacagtatccaggtagaggagcttggagaatcctcgaatgggatattttttgttacaaaacttcttggaccggaggatcttaaggaggcaggagttccgtcctatccctgcattgtgataaaaacccggaaacaggaaaagccggtaacgttccgggaaagcagcagtccggtgaaaaaagagtcggagaaaggggaatagactgtggaattaaaaaaagaaagcatgcagatattaaaggaaaaaagcagggcaaaaagtcagatcacttttgatgaggattttaatgtaccggatgcaaaaccggatgcaggaagactgatccagaataagggcaggatcattatggatgatgtccgtcttactgacgggaaaggtattcttacgggaaatctgcaggtagatatcctttatgtgggggaagaaagagggatcgtcagcagtcttactgcaaaacttccatttgaggaaaccttgaacctgaaggatatcataaacggggataaaatgtgtctgaagtgggaaattgaagatcttacgatccgcctgatccattccagaaagcttaatatcaaagctttggtaactttttgtgcgactgtggatgaaacagaacagatccgcctgccggtggcgctggatgcagaagaggtatctgtcagaaaaaaaacagtccgttttctgggacttaccgtacataaaaaagatacactccggatcaaggatgagtataccattgcctccaatcgtccggatatcgccagtctgatctggtatactatggatgtacgggggctggatctgaagccggaggaaaatgtggtaaaggcaaggggagagctgtctgtttttgtgctgtacggagcagaagatacagaagccccggtgcagtggctggaatattcgctgcctttttccggagaagtggaatgtccggactgcacggaggaactgattccgctgatcgaagcttcggtgatgcatcagagtctggaggccaaaccggatgtcgatggggaagaacggatccttgtttcggatgttgtgctggagctggatatgaaatttttcagggaagaggaatatgatcttattaccgatgtgtatacaccgattcgtgaatgtgttccggaaggaaagaatgaggtactggaacggcttctggtacgtaatttttccagatgcaggatcagtgacaggatccaggtaaaggagactcagggaaaagtcctccagctgtgtcacagtcagggaaaagtgaagatcgataagaccaggatcgtagagaacggtgtgcaggcagatggcgtggtcatgctgaagatcctgtacattattggaaatgatgatatgccgttttattccatggaggcaatgataccgttttcccatatggtggaagcaagagggatccgacaggacagctgttatcagttaaaagcaaaactggagcagctttccgcagccatggcagatggaaatgagatcgagatccgggcaactgtaggactggagcttctggcagttgccagagaaccggtatttatcattgagaaagtagaggaaaaaccactggatatgaaaaaactccaggctatgccgggaatcctggtttatatggtaaaaccgggagatgaattgtgggatatcgcaaggaaatatcacacatctatccaggagatccggacgatcaatgctctcaaggaaaatcaggaaccctctccgggaactccgcttcttgttgtgaaaaaagtggaaggtcagatcaaataaaaagtgaaatattttgctgttgaaaagaatgtaaaaatcatataaaatacatgtataaatactgtatacaaagtacaaatggaggggcttatgcgtttaaaagcaatggcaaagatcaatctcggacttgatgttctgggaaagagagaggacggttatcatgaggtacgcatgatcatgcagaccatccgtatgtatgatatcctggatatcagaaagaccagacggccggggatcgtactgacgaccaatcttccgtttattcctacagaccagagaaatcttgtatataaggcagcacagatgctgatggaggagttcgatgttgaagagggactttccatcaagcttcgtaaatttatcccggtggcagcaggcatggcaggaggcagctccgatgcagcggccgcatttgtgggtgtgaaccggatgttccatttagggcttaccgaagaacagctgatggaacgtgcagtaaaggtcggagcagatgttccgtattgtatcatgcggggaacagctcttgcggagggaatcggagagaagctgaccagacttccggaagttccgaaatgttatgttctgataggaaaaccgggaatcaatgtttccacaaaaacagcctatgagaatctgaatctggaagggatcggaaaacatccggacatcgatggactcatcggagctatcagaaataatgatctgtatgccatggcatccagaatggagaatgtatttgaaccggggatcatccgacagtatcctgtgatcggcaatatcaagaaccttatggaagaaaaaggtgcgctgaaagccgtgatgagtggaagcggtcctactgtgtttggaatctttaataacagggataagatggccgcggcagccagaagcctcagaaagagcgggcttgcaaagactgtatttgccacggatatttacaatagagatggaggagttacaaatgacaagtgatttttctgtggatatgaatgaatatctgccgcttcgggatgttgtttttaacaccttgcggcaggcaatcctaaagggagagctgaagccgggcgaaagacttctggagattgcccttgcagagcgtcttggcgtgagcagaacaccggtgcgtgaggctatgcgcaagctggagcaggaaggtcttgtagtgatgatcccacgcagaggtgcacaggtagccagcatcacagaaaaggatctgaacgatgttctggaggtgcgtatcgccctcgaaaatgttgccatagaaaaagcgtgcaagctgatcacagaggatgagctgggaaggctctgggtggcagccaaggaatttgaaaaaacaaaagcagagggaaatctggtccgtctggcggaaaccgatgtggctttccacgagatcatatatcaggcttctgataataagcgtctgaatcaggtcctgaacaatctccgtgagcagatgtatcgttatcgtgtagagtatctgaaggaggagcagacaagaaatcttctggttagtgagcatgaagagctggtaaaagccatccgtgaaggagatgtgcaaaaggcgcaggatatttctttccatcatctggagaatcaacgaaaagcgatcatccgtactatccgcgcggagaatgaggccaaagaggccgagaaaaaagaataagaaccggatatgcgggaatattaagagagatgtcattggggcatctctttttttaaccgaatcaagtaagtcccctgtttcaattgcgaaaagcaataagcagtgggggaacttgctgtaaaggatggtgactttatggaaacaaggaagatatcgatatctcttcatgaaaatgaatcgtatatccggaaacggtgtgaaaactgcgatgatatcctgatcaggcccatgcgccttggtgagggacataaggcggactgtctgatggtctatattgaggttgcggtttcaaacatgatgctggatgattctgctatcggaaaaatgatcaatcatttctgggagatcccggaggaaaagatccgggaatttatccgccgaaacagtcttggaattgcagatgtgaaggagctgtcttccatggaggaggtatttggtgccattctttcgggaaatgcagttttctttctggatggatacgacaaagcaatgaaaatttccagtaaaggatatccggggttggctgtatcagaggtgaaaacggaaaaggtcctcagaggctccaaggaggggttctgtgacagtgtaaaaaccaatgcggcccttgtgagaaagcggatccgggataccaggctgaaggtggagcagagcagcatcggtgtacgctctaatacggtggtacagcttctttatgtggaggatctggtccatgaggagcttctgactgctgtgaaagagcgcctggaatcttttgcagtggacgggatcctggacagcgggatgctggaacagctgacagaagaagcatggtattctccctttcctcagtttcagacaacggagcggccggaccgggctgcccaggagctgctgaatggaaaagcagttctgctctgcgacaattcgccggtggcactggtggttcccggagcattcaacagttttatggaaagcagtgaagactggtacaaccgttttgagatggcatccttcctgcgggtgctccggtatctggccatggctgtggcaacgctgctccccggactttatctggctgtgatccggtttcatacacagatccttccggcgaatctgatcctttcctttgcacaggcaagagagggcgttccattttccagtgtagtggagctggtgttcctggaactgtcttttgagctgatacgggaggctggtgtgcggatcccgggagctcttggaaatgccattgggatcgtaggaggactgatcatcggacaggctgcggtggaggccaatcttgtcagcccggtggtagtgatcatcgtggcactgacagcactgggatcactggctatacctaatgaggaatttgcttctgcattccggcttctgaagtacgcttttctgtttctgggaggatttctaggtatattcggaatcgtgttgggactgtatctcaccatggcgcatctggcaggacttttaagcttcggtgtcccatatctggtaccttttgtagagaagaacagtgaggcggaaaccggtggaaggattttgcgacagcccttccggaagcggaaattccggccgctgtatgccagaaatgcccagaaacgcaggcttcggacaaggccatggagccggaaaggataaaggttatgagatttgcggagaataacaggatttcccacaaacagctttttcggcagatcatactggtgtttccggcgccgtttctgctgtgtctgtttaagaatggagcgatgttgggcatcagtgccatggcagggacagctgctgcggccgtagtgctctccttttatgtgatctggctgatacgtctgacacctgtatatggagagctttccaaaaggacaggaagttttactgtacgatttattggcctgttctttttggtatatgtgatcgcaagttcggcatttctttcgggccttctgggggaggtgatcccggaaagtctgatcagcgggatttccggaaaatggctgtctcttcttgcagttgcagcctgtagtctgggaacgcatcgcggaatgcagagaagagggcggatcgctgaggtgtccggaaggatttttctggcagggatccttcttctgatgcttttatgtgcagggcagggaaaaacagagtactttatggaagtgatgaaagatccggaaacaggatttacaggagagcgatggctccgtgatctgtatacacttttgtgtgctttttcaggagcaggacttcttcccttcgggctggagtatgcaaaaaaacagggaagtgccagaaaacctgtgatcctggcttttcttacagtttgcgggatcatttttggaatgcagctccttcttccggcagtctttggaggtgcacgccttaaaaacgagatctgtccggtactgcctcttctggagggggcagatcttccaggaaacgtactggcgagatttgatgtgatatggatggggtttctggtattcggacttttgttttctatgggaagtttgtttcattacggaaatcagatcgcggaaaaaaccggattcgggaccggtcggtactggatcccggcagcaggctggctgctttccctgtatgagagaaacgggatggggatccgggagtattatggctggtatctggggtacatctttgtgccgtttctgcttgtgatacagctttttctcagtacggaaaaccggggaagacggaagaaaaaagtaactgtggcaggacttgtcctggtcatcactttgacgggatcaggctgtgcggcagtagaaccggaaaaaagagcttatccgctggcactgggggccggtgtttcagagaatggctttgtgctgaaatatgcaatgccggatatgagtacagctaccggacaggaaaaaccggacgaagatccgatttctgtgctgactctttccggccgggactttcaggagatcgaggcagtctacaaccggtctcaggaaaaatttctggatcttggtcatcttgaagtgctgattctggatgaacagatcatggaagagggatcccgggaagcactgatcggatatctgaagcaggaagagcatatcggagaggatgtctacgtgttccggacggatatgctgggagatgtttttcactggaagggagcccgggaaagctccataggggaataccttcagggaatccaggagaaccgcacatccgggcagcagaagaagggtgtgactctgcgggaggtatatcatcagttctgtcaggatggaacgctgccctggcttccggagatatgggtggaaggtgagcttctggaagtggattacggcagtaatgaatagatgggagccggactgttaataatacagatgatgatcagtacgataaatcgtacagtatatctctggataagatcatcagaagatttttgacaggagggcttgctcatggagcatataaaaatgaagaagcatgtattaaaaaaagcaggagggttccttttgctcacggcagtgatccttgcagggagtacctgggagagaagaactgccggtgatcggcagccacagttttatgcctggtggggaacgatctacccggaattctgttttgaaaaagcagaggacaacggggaaaataagccggtgaagatatccttctggcttgcgcaagccctggattggtgatacaatatttcaacggaccaatcacgttcgattaattatttcaggagataagatcaatgaatatagacagaaacgcaccggtgggtgtgtttgattccggtatcggaggactgacagtagcccgggagatcatgcgcaatctcccatcggaaaaaatcgtatatttcggagacacagccagagttccctatggaagcaaatccagagaaacggtgatccgttattcccgccagatcattcattttctgcaggaacagaaggtgaaggccattgtggtggcctgtaatacagccagtgcatttgctctggatgcggtgaaggatgaactggatatcccgattcttggagtgatcgaggccggtgccaaagttgctgcccaggaaaccagaaataaacgggtgggcattatcggaacggtgggcacggtaggaagcggtatccatgcctcttatctgaaggaactggatccggagatcaccgtgatcggaaaagcgtgcccgctgtttgttccactggtagaagagggctggtatcatgatccggtcaccgaggaggttgccagaagatatctgaaggagctgcaggagcaggagatcgatacactgatcctcggatgtacgcactatcctcttttaagatctaccatccgcaagatcatgggtgaggaggtctgccttgtgaatcctgcatatgagacggcgctggagcttaaaaagttactctccagactggatcttgccagcaatgaggtagcacaggaggaattcccgtatcgcttttatgtaagtgatcttgcagagaagtttaaggattttgccaattccatcctgccgtataacgtagaaaaaacacagaagatcgatatcgaaaaatattaaacagatctgtacataaatgataggagaaaagaatgcagaaagaagttttgatccatgtaagagggcttcagatgatggatgcacagggggatcaggaacctatagagatcattgttccgggacagtattatttccgcaatggttctcattatctcagatatgaggaactgctggatgaaacagcagaacccaccatcaattacataaaagtatccggaaagggtctggaggtcagcaagaagggactggtcaatgtacacatggtatttgaacagggcaaaaaaaacatgacctattatactaccccttacggaacacttcagatgggaatctcagctacgaatctggagctgacggaaagcgaagagaaccttcagatcaaagcagattatgcgctggatatgaatgaagaacatgtggcagactgctatctggcgatccaggtacagccaagagactgcaaggattttgttttatagatcctgcagaaaataaaagatatataattacactacataagaacagccgccatgcatcaggggaattcctgaaagcatggcggctgttttggattctgatcatttacggaatcttgcgaggaagccttttttcttcttctgtggtgcttcgagagaaccacggattccttttacgccaacgatgtaaaggccgctgacttcagctttgatttcttttttgaccgggatcagatcaaaaactttttcatctgcaataaggatgttgatcttcggaccgactttggcttttacgatcggaagcttggaccggcgcataagcttaggtgtctggtcgatgaccatctgtggaagtccggaatctttcagcggcatccgttttttatcgatgaccagcatggaaactgtctgcttgttagcctggatctgagcctgctgttcgtcctgttttttctgagctttttttccgaagaaatagagtgcgatcactgctgcgatcagaataacgaggatgaccagaagaacgatggtaactgtactcatttgagaatccccctgtatatatatttgtttcgcaatcggttacattacgcaaacaacattttagcattgtttcgtcaaaaaggcaattaaaaaagtgaaaaagacaggtggaacggtggaaatttcagcagttaccagttataatgattacgatgcagttcatctgtgtatgctgcagagattacaggacataactatctttgagctaacatatgtaatggataaaccagagatggaggaaatattatatgaaagagaaaaagcccgggggaacccgaccggaaatgggaactcctgagtacgaagaatggcggaaagaggtattgaaacgccgcagaaagcgccagctgaaggaacgcagaaaacgtctggccatcataacagcggcaatgatcgtcgcagtcggggcatccgtaggggtcggtgcgctgaagggcagaagtgagaaggcttcaaaagagaagatggtttcttctgacaaacagaaagaacagaccgtttccggagaaaaagctttagaagcaggtactaaaaatacagagaccacttccaaagatactctcgcagaggcaaagcttctggccagtcagtataactatgacaaagctatcgatcttctgaaaaaggctccgtcctatgattcggataagaagatgcaggcagctgcaaaaaaatacgaagacataaaagcaacctgtacggcatggccccttgaaaaggtgacacatgtcttttatcatattctgatcaaggatccatccaaagcgtttgacggagactacaaagaagcagattataatcaggtcatgacaaccattgatgagtttaacaagatcacgcagaccatgtatgacaagggctatgtgatggtaagcatcaaggacatggcaaaggcagacgacaacgggaatatcacagagggagagatccttcttccgcctgggaaaacgccgtttgtcctctcacaggatgatgtatgctattatcattacatggacggtgacggctatgccacgaagctgatcgtggatgataaaggaaagatccgcaatgaatatgtggaagatgacggaagtgtctccgtgggagattatgacatggttccgctgatcgaccgttttgtggaaaagcatccggatttctcataccgcggtgcaaaaggaatcctggcacttaccggatacaacgggatcctgggatatcggaccgacgaaagctatgagacccgtccggcagatctggatgaaaataaagtacagtggctggatgcacatccggatttcagcctggaaaaagaacgggcagccgcaaaaaaggttgccgatgccatgaaggcagaaggctgggaatttgcgagccatacctggggacatcagaatgtgggacaggtcacactggagaagcttcaggcagataccgaacgtttcaagaaaaatgtagatccgctgatcgggggaacggatgttatcatttttgcttttggaaccgacattaccaatgaccaggagtattccggggataaattcgaatatctgaaggggcagggatataattattactgcaacgtggattccagccagtattatgtacagatccgggatcggtacttccgtcagggaagacggaatctggatggataccgtatgtattataacccggaactgttatccgatctttttgacgtaaaagatgtttttgatccggcaagaccgacaccggtaccgccgatgtaacggtcatatccggagatacgaggggacttttagaaaggggcatatatattattatgaagaaaaaaattgcaggtgtactgacaacagtgcttgcggcgtcacttcttgtgggcggaaaccatccggtcactgttcaggtggacaatatgatctccgggacacaggatgacgaggatacacagtctgatgaagcggaagcagaagctgcagaagccgaagaagaacagtccgaagaagccaaagtagcagcggatccggaggatcagccggcagctaccgagacaccgaaggaagaaaaaaaggcagaaaaagaaacacagaaaagggaagcagccgagaacagctccgacagtacttcctcagacgaaaaaacacttctcaaaaaagccaaaaaactggcacagcaatatgattacaccggcgcgatctccgtgctgaaaaacaactggaaatttgccaccagtgacaagatgcaggaagcagcagcagcctacatgaaaaaaagagatgcctgtgtggaatatccacttgagaatatcacccatgtattttttcattccctgatcgtgaatacttcactggcctttgacggagattccgatgaggccggatataatcagatgatgaccacagtcagcgaattcaaaaaaatgctccagatcatgtatgataagggttacgtactggtgagtcctcatgatatggctgtgatcaatgatgacggaaccatgagcaggggaaagatcatgctgcaggaaggcaagattccttttgttctttcagaggatgacgtcagctactatcattatatggacggagacggatttgccacaaagctggtgatcgacgacaacggagatatcaaatgcgagtataagaaggcagacggtacagttgtgaccggagattacgatgtggtgccgatcctggattcctttatcaaagaacatccggatttttcctatcatggaagaaagggtattctggcaatgaccggttataatggtgttctgggctaccgtacagatggggcatataagaccaagaagaatcttcaggatgaccagaaggcttttctcaaggccaatccggattttgactatgataaagaagtaaaagcagccaaaaaagtggcgaaggccatgaaaaaggacgggtgggaatttgcaagccatacctggggtcacagaaacgctacaagctccacagcagcggagttgaagaccgataataaaaaatgggaaaaatatgtggcacccatcctcggaaaaaccgatatgatcatttttgcctttggtgcggatatcggcgactgggaaggatacacctcggataatgagaagtatgagtattacaaaagccgtggctaccgctatttctgcaatgtagattccagtcagtattttgtgcagatcacaagtgaatatttccgtcagggaagatggaatctggatggatacagaatgtattacaatccggatatgctcagtgacctgtttgatgtatcggaggtgtgggattcttccagaccgacaccggtaccggaaatgtaagacagcaaacacactttacaaatctgtataaaaaaagattataatcgaaccgacagtacttgatgaagggagtaggttatgaagaaaaaagcatatctcatggttcttgcactgtgtgcggcactggcgatcactgcatgtggcacatcaacagaccagaaagatgacaaaaaacctgcagcagaagcgcaggatacaacagataaagaagattccggatctgcagattccaaagagtcagaagaaacggattccaataaagacagcgaagaggcagcctccggagatacaaggcttgtttccgtggatgatgtgagcaaatatgtgaccatcggagaatataaggggctgactcttgataacacagtagaagccgtaaccgatgatatggttgacggaaggatcaaggaagagcttcagaacaaggctgaggaagtaacggaaggcagtgttcagaacggagatgtggttaccattaattatgtgggaaccaaggacggagtggcttttgacggcggtactgcaaataattatgagctgaccataggctccggaacgtttatcgacggatttgaggacgggatcatcggaatgaaaaaaggtgagactaaggatctcgatctgactttcccgaaggaatactcttcggaagagctggccggacaggaagtggtatttaaggtcactctgcagagctttaagcgtgcacctgagcttaccgatacttgggtagccaagaatgcagactgcaagagtgtggatgattacaagaaggaaatccgtactacactggaggatgaagcgaagacaagtgcacagaacacattgcgtgaaactgcatggaacacagtgctttcagcatctgaagtgaaggaatatccacaggaggatctggatacagccaagacagagtttcgcagtctgtatgagaattatgcaaaacagggtgatatgacgctggaggattttgtaaaagctcagggaatctccatggatgattttgaggagcagagcggtcagtatgcggagtttaaagtaaagcagaacctgatcgtacaggggatcatggataaggagaatatgacacttgaagataaaaaatctctcagtatccaggatgaactgatcaaagcatacagtgtgaaggatctggctgcgctggtagataaatacggacaggcagccgtggatgaatccatcggacttctcagagtggaagattttatcctggacaatgcaacggttgaggagaaggtttctgccggtgatacccagggagtaaacggagatgatccttcctcggacggaagcagtgcggaaggtaccgtggatgaagagctggaagcggcagaggctacagatatggtgccggaagacggcgaggcggatcaggatgcagacagcagcacatcggatgcagcgggtcaggagtgatctgacagtatcagcagctaaaaaagtgtggtgcccggaatgtgttccgggtgccattttttttacatgtgcatcgcgaagtgtgttactgagaacggagtgaacagtaacaaattaagagattctttcgggaatttccattgtatttaagcgttaaatgcggtatgattaaagacagacattaaatatcaaagaaagatatgagtatataaacggggatgtaaaaaatggacaaaagagttttgcgtgagaggatgcgcagaaaacagcaacagttaagacggcggcggatgatgaagcggataacctgtgtagttgcggcgattcttctgctggtttttgttgttcgaggggtaattcttcccatcgtcaaccatgcaggcggcggaagcaataaggatgcggagacagtaaatgttcaggcaaataccgccggagcttccacagacagcagtacgaaggacggtacggcatcgacggatacggctgcttcggatacagacagcgcggattccggtacggatgcaacggtgatgccggtaaagggcagtgcagcaggcgaaaggctttctgttatgactccgggatggcatgaggattctacaggaaagtggtatcagaatccagatggtacatattatgtaaatggttttgcggatattgacggaacaacatacagctttgataaaaagggatacatgcagaccggatgggtggagaaaggtgtgaaggactattattttaatgaggatggctcttatgatccttccaagaagcgcccgatgatcgctctgacctttgatgatggtcctggagagtatacagagacacttcttgatactgttgagaaatacaatatccatgttacgttctttatgctgggacagaatgtggagggccgtgaatctaccatacagcgaatggtaaagcttggctgcgagatcggtaaccatacctgggatcatccggaacagacgctgccgaatatggatctggattctgttatgcaggagttccagaagacggatgatgcactggtaaaagcctgtgggcaggcatcaacggtatgtcgtgcaccgtatggcgcgatcacagatgagcagatgagtgcagttggcaagcctttcttcatgtggtctacggattctctggactggaagctgatggatgcggatgcagattataaccagatcatgaatgattcctcactgggagacggttctatcatcctgatgcatgatattcatgaaccatctgtgaagtgtgccacagagaagctgatcccggcactgatcgaccagggatataagcttgtaacagtcagcgagcttgcagaagcgaaggatgttacgttacagagtgcttcctattctgacttctgggacagctctcttcaggctggtcgtgttgcaggatatgcaggaaattccagcgattcagaggattcctctgaggatggctccgatggaagcgattcttctgacggatctgatgtcagtgacggatcttccgatgaaggggactattccgatggttctgacgaaagtgattattcggatggatcttccgatgatggaagctatgatgatggtttctacgacgaatcttatgacgatggaagcgaagaatattaaaaaatgacaggagagacctgaatgacaaaatgtgcgtcattcaggtctcttttttgactttatctgacactgtcggataatagacacatattagccggagagggtttttccttgactgaaaatatggggattggtataattatagaataaaaaactccacttaaaattggggaatggacggtggcagaactataaagggaggtacctgaaaatgggaaagaaattacaatttacggagcttgaccagtatctgttcggtcagggcacgaattatgatatttacaggaagctgggagcacatccggacacgcagaaccggaaaaaaggggtttattttgcagtgtgggcacctaatgcacaggcggtttctgttataggtgaattcaacgaatgggatacggagaagaatcccatgaaaaaagttggacccattggcgtttatgagacatttgtaccgggagcgaagatcggacagctgtataaattttacattacaggtgcacatggtgaggagctttacaaggcagatccatatgccaatgccgctgaaatgcgtcccggaacagcctctcgtattacagatatcaccaactataaatggaaagatgatacctggatgaaaaatcgcgagaactttgatccggacacaagtgccatgtctatctatgaggtgcatccgggttcctggatgaagcatccgcagacagcagaggatgaggatggtttctattcctacagagaactggcgccgaagcttgcacagtatgtcaaaaaaatgggatacacccatgtggagcttatgggtatcgcagagcatccttttgacggttcctggggctatcaggtaaccggctattacgcaccgacttcccgctacggaacaccgcaggatttcaaatatctggtggattatcttcaccgtcagaagatcggtatcattcttgactgggtaccggcacattttccgaaggatgcacacggactggttaactttgacggaactgctgtatatgagcatgcagatccgagacagggtgagcatccggattggggaaccaagatctacaattacggacgtccggaggtgaagaatttcctgatcgcaaacgctctttactgggtagaggaatgccacgttgatggtcttcgtgtagatgcggttgcatccatgctctacctggattacggtaagaaagatggtgagtggatcgccaataaatacggcggaaacaagaatctggaggccattgaattttttaagcatctgaataccgttgttctcggaagaaatcatggaactgtcatgatcgcagaggaatctaccgcatggccgatggtaacaggtaaggcagaagacgacgggcttggattctctctgaagtggaatatgggctggatgaacgacttcctggaatacatgaagctggatccatatttccgtaaatttaatcataataagatgacattttctatgacttatgcatacagtgagaaatatgttctggttctgtctcatgatgaagtagtacatctgaagtgttctatgctggagaagatgccaggagagctggatgataaattcaagaacctgaaggccggatatacttttatgttcgggcatccgggtaagaagcttctgtttatgggacaggatttcggacagctgcgtgagtggagtgaggccagagagcttgactggtatcttcttggcgaggaaaatcatcagaagctgcagcagtatgtcagtgatcttctgcatatctaccgcaaatatccggcactttacggtgcagataatgatccatctgcatttgagtggatcaatgccaacgatggcgacagaagtatcttcagctttgtgagaaaatctcctacaagacgtaataatatcctgatagtatgcaactttacaccggtagcacgtccggattaccgtgtaggcgttccgaagaaaaaacagtacaagctgatcatggatgagcaggggcttcttccgaagggcaaggtatttaaagccgaaaagaaaaattgtgacaaccgggaattttcttttgcatatcctttggaagcttatggagttggtatatttacatactgatattctgtatagcgaaatctttgaaagaaaatataaaagataaaataaaaataccggagatctgtgtacctttgaagtgttggcttcagaggtgccggatctccggtattttatggatctgggtataaactggttacgagttatcgctattcttcgctatcatcgtaggaaccatcatcgtaggaaccatcatcgtaggaaccatcatcgtaggaaccatcatcgtaggaaccgtcgtcgtaggaaccatcatcgtaggaaccgtcgtcgtaggaaccatcgtcagagtaactgtcgtcgtaggaaccgtcatccgaggagtcgtctgtgctgcctgagttattatcagcagagttaaagtcttcggaagtgatgtcaatgcctttatctgcgtaatatttttctgctgtgatagagtcggtatcttctacgacatttccggatgcatcgatcatgttcaggtctgtgtcaatggtcacatccaggaggttggttcctgtggatggagtgacattcatggacatgatctcgttgaacttctttttcaggttgtcaagagtgaatacaccggaaccaatgtatgactgtacaccgttctgagatgcaagttcttctgtgtaatcggaaagcatatatggtccgaattcaccggcatcgctgttgtaatgcatgaccagaggttccactgtaggggtcaggatctcaattgaggtcttgccgtcctgtacggttttctgaatggtgaattttgccattccgccgagaagttcttccagcttctgctgggtggatacgaaatttcccagagagtagaagactacagtttcattgcctttgtcatcagtaaggcggccatatggctgaagtacatgtggatgtccgccgatgatgacatttacgccctgctccataaggtaggctgcccactgtttttcgtattcgtttggcatggtttcgtcttcggtaccccagtgtgctacaaagatgatgcagtcggcctgctgttttgctttctggatcatggctgtgatcttgtctttgcggatcatgtcgatcatgtagtcttttccttcaatgccgcctacgtttgtgccgtaggtgtaatccagaaatgcgatcttgataccgtttacttcacggatcttgacggtgtcggcatcttcctgggagtcgtggatccccagaagtgtgacatccggatatttggttttccagaagttcagtgtgtctgtgaggaagccttctccgaagtcatcgatgtggttgttggcggattctactacgttgaatcctgcttttataatggcgtctcctacttctgtgggtgttgcaaaggatgggtaggagcttacgctgtcatggtcggttgtgaagacggtttcctgatcaatcattttgatgtctgcgtccttgatggcgtcctggatgtgggtgtagatcttgtcgtagttccagttgccgtcagaggatgcgcctgcgtcgatgagactctggtgatagaggttgtcgcctactgcgatgacggaggcagtggtagtttcggcagtggtgtcggctgcttcctgatcggccttggctttgactgccgcggcttttttctgggcgtctatagctggtttgcggatgaggcggtagtccagctgattgaagaagaggaccaggatcgcaaggacgatgacggatgccataagacttacgcgggcattgctgcgttcgcggaagttcagggggatgttgtccttggggttgcgccgggtttctctgaggggctccggggtggagctttttttgaagactcctttgagggagtcggggattttgatgttgggtggaaatttcatttatgttttaccttgtctttctttggattttgaatgcgattgattggtgattgttcgctttgttatttttgatttttgttgtgtggttgtattatagcagatttttattttggtgggaagagggtggtgggggtgaacgtacgcccgagccggggatgctgtctggtctgcggcttcgtcgggggctggcttctaggctgccgggaatctgctaaaagcgttttccaaaagtccgaactcgcgtcttgcagccgctcagacagcggacttttgaaaaacaacgcagatttccgccagccaagaatcagctcccctcctgcagaggcagaccagacagcatcctcggctcgggctgtgaggttcaaggcggtagggctagggtggctgggcgggagttggatgagccgtcagcgctgcgctggacggcgtggaggaaaggctgagtttccttggggtttgatgggaagggggtgggccgaggcgcttcgctgtcggctgggagtgtgtcgaggcgcttcgttgtcggctgggagtgtgtcgaggtgcttcgctgtcggctgggagtgtgtcgaattgtggtggaatttttggatgggttttgcgtgattttttttctggtgtatggtatggttggtatatcttataagatcttttgtctgtatggacattcttggagcttcgggttctgaagcgttttccattttttgttactgtgaaggttctgaaaatccgttttatggggtttttatgttttctttgtatggtataatttatatatcagtaggagtgttaatgaataacaatactatatttgacgatgttttccggacaatggtggagaagatgacttacctgctcgttccgcttatcaacgagatgtttcatacctcatatccgaaggatgtgaagatcgtgcatcttcggaatgagcatcagctggaggacggggaactgatcacggatgcccagcttttgatcggggataaggtgtatcatattgagtgtcagagtacggatgatattacgatggcgatccgaatgtttgagtatgattttgcgattgctttggagagtaggcggagagtaggacggaagttttatgtggagtttccgagatcatgtgtaatttatttaagatctacgaagaatacgccggatgttgaggaagtggagctgcttccggatgggcaggtgtgtgtatatcgtgttccgacggtgaaggtggagcgttatacaaaggatagcatttttgagaagaatttactgatgttacttccgttttatgtaatgagatacgaggagtcggcgcatataataggtgaggattctgagaaactacgaagattattgaataactgtgcgtcgcattctcgttacttcagtagtgatgagttagacgcactatttttgaaaatgaacagaacaaatgtttgtaagctcttcttgcgtatggtataataaaaacatggagaaaaatatatttaatatcaataataatggactttcatatggtagaggatatgtgtattcactgcagtaccatctggtatggtgtacaaaatatcggaaaaaagttttaaaagatggtattgatgcagaatgcaagagaatgctctatgatcttgcagaagaatataaatttcagatcctggcaatggaggttatgccggatcatatccatcttcttgtagactgcagaccacagttttatatctcggatatgatcaagatcatgaaggggaacattgccaggcagatgtttcttgcgcatccggaactgaagaaggaactttggggagggcatctgtggaatccatcttattgtgcagtaactgtgagtgacaggagcagggaacaggtatgttcttatatcgaagggcaaaaagaaaaacagtaatctgaaagaactcgttttttatatttgtaagaaagaggaaaaaagatgaggacagtatccagttatggcgtagaactgcgaaaacagaatatcccgatccgccagacactggatatttatcgttctgcggtcagctgtctgattgagatctatgcccaggcatgggatgaactggcagtgatcacggaacctaaaaaacgtttcaatactgcagaacatctggtgcataccacaaaaaagaatcaggcaaggtttgattttgacctgcgatttccaaagatgccttcttatctcagaagggcagctatccagcatgccctgggaagcgtatcctcatataagacgaggctggaactgtggaaaaaaatggataagaaaggcggcacgccgaagctggtgtgtggtaatcatgctatgccggtattttaccgtgatgtgatgtaccgtgaagatactgaggaaaaagatggagcgtacctgaaactttatgacggccatgactggaaatggttccgtgtcggtttcagccatacagatatggaatatctgaggaaatactgggcgggaaaaagaacagcagctcccgtgctggaaaaaaggcatcgtaaatacttcctgcgtttttcttatacagaagaggtgccgcttacaaaggcacctgtaaaagaacagattatctgcagtgtggatttaggaatcaatacggatgcagtctgcactattatgcggtcagatggaactgtcctgggaagaaagtttatcgatctttccagtgaaaaagaccggatgtaccgtgtgctgggacggataagcaggttccagcgggagcatggctctgcacaggtgaaaagcagatgggcttatgcgaagcgtcttaacacagaactcggaagaaagatcgccggagcagtcacaggatatgcggaagaaaaccatgcggatgtgatcgtgtttgagtatctggaaacaaaaggaaagatatccggaagaaagaaacagaagctgcatctgtggagaaaaagggatatccagaaaagatgtgaacatcaggcgcatcgtagagggatgcggatatccaggatctgtgcgtggaataccagcaggcttgcctatgatgggtcaggaacagttgtccgtgatccgggcaatcacagtttatgtacattccagaatggaaaaagatataactgtgatctttcggcgtcttataatattggagcaagatattttatacgtgaactcttaaaaccctttccggcaacggaaaggtttttgctggaggcaaaagtcccttcagtaaagcgtaggatctcatgtgtatatgcggacttaagagaattattttcagaaatagaacttttaagagcagcataaacacaggcagatatacagcggactacctgtggtgtgggaacctgccatatctggcatggaaaaagcgcatgactgcgcatatcctaagttacaggcgtatccgtcgatatttagccttgtcgcttaaagcgactgaggagcatgtgactttagtcatgtgagatccactagattgattgtaaggatatcagattacattttccgaaaagaagaaaaaatcaagtagaaaggagtagatgaaattataggtggaaaggttttacagttggaatcggaacgcttgtttgagctgggagaagcacgtgggaaaattattggaaaagcagaaggaaaagcagagggaaaagcagagggcgaggctattggagaaacgaggatgaggatgttgatcaatcgtttgatcgcggatggtcgaatggatgagattgggaaaatcatagacagtgcggaggtatgcagggagttgtataaagagtatgatttgtgagaaataaagaggatattttgtttggtggcaaatgtcagatttttacagaagagaggatataaacatgggtgtttacaggcgtaaggcacagtatcatgagacggatcagatggggatcatccatcattccaattatgtgaaatggatggaagaggcccggatcgatttcatgaaggagttgggctttggttatggtgaggtggagaagcgtgggattgtttctccggttgcaggggtttcggtttcttataagaagccggtgctttttgatgatgtggttgggatttcggtttcggtgaagaagtacagtggtgtggttctggagctggcttatgagttttttaatgtgaccagaaatgaggtttgtacagaggcttcctcgaagcattgttttaccaggaatggggagctggtttctctgaaaaaagagattccggaactggatgtgctgttcagaagctgtgtgaagggggatcgagtctaatggaagttgtggagatgcttgataatctgaaggaaaaggcccgcagggacccggcgcttcgggagatgttgcttgctacccgcagggagaaagagccgctggctgctttctgtaagaagtgccgggagcttggggttccggtttatgagatggatctgatcgcagctggtgaggaattttatgcagcgatgaagaggagtaccaatggcggcggagagaattctccgatgcttgagggtgaggatgatttttatgaactgttttttgctgggttggagtgaaaaaatagtttcaaaattccgcatcaatatacttctccagcaccgggaactgtacaccaccgatcttcagtacctggctgtggaaagctttcagatcaaagtcctggccaaggcggttctgttcggaagtgcgtaagtccagaaggcttaagtagccccagtagtatttcagataatttcccggggtttccaggatatactggtagatctcggagacaacggcgctgtcttcgataccaaaggctttcagaaagctggcggcttcggcctgagtccagccgttgtaatggatctcaatgtccagaagggagtacatgcataaattgatgcttcggttcagccaggagatcctggcaagctctgtggcagaaggatcctgaatataatcggcggcgtactggtaggcatagggttcgatgtaggtggcccatccttctgcaaagccggaggtgcagagaagatttcggatgttggaggatttttggcgttggaaggtgacagtctggtaaagatgccccgggaatccttcatgtgccagtgtggtaaaaagctccaggccctggtagccggcagccggatttatgtagatcacattgggggttccggtatccataggtggggtgagataaaaggcggggcttagatattctttcatggaatcgtggactgtgcggagctcaaaggtgacatctgtgagaggtgggaagtctgtttggatcttctgctgcaaggcattcagcatctgggcaggctttatttctctgaaagtgattccccggctgagagtagtcagaagctccgggttttgtcgaagtatggttcctgcgatgccaatctcgtcggaaagctgtccggagagtcgtttttccatttgctttacaggaacgtaagagccggtctgactctgaagaagatagagatagtaggcttttcctcccttgaaataagtcaggccacgagtgttttttcctgtgccacgcaaagcttccagaccggtcataagttcctgataggctgggatgacttctgttttcataagattttggtgggtcaggaccagagcgttctgctctgaggaaggaagttttccatattcggatagctttttctggaaaatttccagcatataattgttgtcgggattctggataaaagcactgcattgtgcaaggacccggtccagggtagtatcgctcataaagaagccagcttcggatttctttttttcaaatttcaggatgctctgaaagtatgggcggatggtggtgagaagattgaggtagtcggtgatatcacgatcttcataaaaggcatattccgccagaagaaccggaagctgagcctgaataccaagacttgggccaagaggctcctgaagcagataattgtcgcccagtgatttttctgtgtggtaatagaggagcatggagtccagcgtcagctgattttccgtggaaaggcggctgtagcggaaggatttcagctttttttcgtactggctgcagatctggtatgtatttttcatatctgtggggacagtgccaagagaagctttttttcgccggataccctgtttttccggatgtgccagggtataatggagggtaagggtgctgccggaaacttcattttgaaaaacttttccggaaaaggcttcgaattttccgttttctgtgatcccgtgagtggaaaaataaccggcagtaaggccggtgagaagtgccaggataagaagcagagtgatgaaaatagaaaatttatttttcctgattttaagagacataagacagtctttcattactgtttacagacatataccatgtggagagtgctgatggtctcgaagcaaacagtaacgtcctttcagagtggcgctttgttctatcatattggaaaattacggaatctatgatattatgtgagcggaaatatacaaaaatggagaaataacatgagtgatatttatgatcttgcaattttaggcggaggtccggcagggatcacggcagcgatctatgcgtccagggccaggttaaataccatatggatcgataaaaactttgcaccgggcggtcaggtcacagctacctatgcggtggataattatccgggaatgccggggatatcgggcatggatctcggagaagcctttggggcgcatgcccggaagctgggattggaaccgcagcgagagaagattctttccctggaaaatatttccggagagatcaagacgattcgtacaaaaaagcatgaatatcaggcgaaagccctgatccttgcatttggggcagagcaccggaagctggatatcccgggagaggatgatctgagcggccttggtgtttcctactgcgctacctgtgacggagctttttataaggatcggaccgcagtggtagtggggggaggaaacgtggcagcagaggatgcagtttttctttccggcctctgtgaaagggtatatcttgttcatcgccgtgatgcgcttcgagcagatcagacacttcaggagaaaatttttgcctgtgagaatatagaaatggtgtgggacagtgttccccttgagatcctgggacaggacgaagtgaccggtcttaagatccgtaatataaaaacaaatgaagagagggagctgaccgcagatggtgttttcattgctgtggggatcgttcctaatacgacacttgtaaaggatcagctcaagctggatgaaaatggatatatctgtgcaggagaagagggggttaccagcgcacctggggtttttgcagcgggggatattcgtaccaaggcacttcgccagatagtaactgctgtttcagatggagccaatgcagtggcttccgcacagaaatatctctggaggaaagataatggcaacgattaaggaaatcgcacaaagagcaggcgtgagtacaacaactgtttccaatgtcatacatggaaaaacaaaaaaagtatctcctgccaatattcagaagatcgagaatcttatccgggaaatgggatatgtccagaaaatgggactgagagttctgaataaagaaaaatcccagctgatcgcagttgtgatcaattatcataaagacttcagggattctatcatcggagatcctttttatggaaagatcatcggttttatcgagaaatacgtgcaggagctgggatattatctgatgctgtatttcgcaaaggatacagataagatattccagatggtcatgggctgggatgtagatggcgttattgccatctccttcagcaaaagcaactgtgaaaagatctatcagctgatcaacaaaccgatcgtttccattgatgcatacggtgagcttgatgcaggccaggaaaaacatgtcctgaatatcggactggacgacgaaagcggcggctatcttatgacaaaatatcttctggaatgcggctatgagcatatccaggtttgtgcaggccgtgataatggtgtggaccatcttcgttacatgggcgctcagcgggcggcgaaggattttgcaaagaaaaagcagaaggtgcagtttactgctcttggaatgaactacgccaaacgaaaagaaagctatgcgtggctgctccagcggaaaaaaccaaaggccgcactgtttttcctgtcggacctctatgcattggaggctatcagctttttcagcagtcgtggagtaaagattccggaggagattggaattgcaggatacgataacatcagctatgcggaattttccgtgcctcgtctgactactatcagccagaatgtggagcagaaggcgtctcttgcagtggaaattctgatggaacggatcaatggagtggaaaaagagcgtgaaaatgagatcatgcttccggtcacgctgatccccaggagatctgtacagccgcagcatgaggaaaagtaagtctgcagagaatgtacctgatctgatcaggggggtagatacgagaagtcactgcagaactgtgaaaaacagaaaatcgggactttcaatatagtaagagtacagagaatctgagatataaagatatcaaaagccgaaatatacgggaactgtcagtgtctgacagtcagagtattttcggctttttgtaaatttacctgaaatcgtaaaagagttatcctgtgtaggttcgtgctgaagatgtggataataagcatttgctgttctatgtgaaacctgcacaaaaccatgattttgaacttgttacaatgataggttatgtacataacctatttacacagtctaactttgatgctatagtgtgaacataaaggttaggtacataaccaaagggaaagagtacagaaggagtgaataccagatgaaacagattctgatcgccacacatggaaaaatggcctccggcattcgttatacagcagagctgatcgttggaaaaatggatgagatcacaaccatcgacgcatatgtgacaccggaagacaatgtggagaaaaagtttgaagaatatttcgcacagcatgaaaacgacaggattttcgttttcacagatctgatgggaggaagcgtaaatcagaagcttctgagatacagccagaaagaaaatgtcatactgatcacaggaaccaaccttccggtcctgatgcaggttatgatggcagatgacgatgtgacagaggaggagatccaggagttcatcgatgatgccagagaagagcttcagatggtagaccttggcggtggaaagaaatccacatctgaaaaaaatgctgaagaagatactgcacagggtatcgaaaatactgcgcagatttcagaagatgctgcatcgtatgcaaaaaaatccgcaccgaaaaaagctctggctccccagtcctatgacaattccacagcaaagatcaccgcacttcgtgtagatgaccgtctgatccacggacaggttgccatgacctggaccaaacagctggctgtacagggaatcgtggtagctaacgacgaggcagctaacgataacacccagaagatggcattgaaaatggccgtaccgggcggaatcaaatcgctgatcaaaccggtggatgaagccattcgtatcttaaacaatccgaaggcatccaggatgcgtatcctggttctgacaagaacggtaaaggatgctctgaagataagacaaagtgttggtgagatcggattcctcaatgtaggaaatacgggacgttttgatgggatcgatgtttccgagaagcttgtcctgaccccgactatcatgctgacaaaagcagaacagcaggcactgaaagagctggtggctcttgatccgaaggcctgtatgcagcaggtacccaatgatgagcagaagcttgtgaaggatgtactggacaagcttgactgacatccactgaataaataaaacgtagcacaaaaaagggaggaaagaaaaaaatgttaaacgcatttcttgtagcacttgctgtatttatctgtgtcggcggtgcagagctggtcggatttactatgctgaaccgtccgatcgtcatcgggccactggtaggtctgttccttggagatcttcacacaggagttatcatcggagcttcattggaagctgtattcatgggagttgtaaatattggcggagcttctgcagcagaacccggaattgccacagctgtaggaactgcctttgccatcatgcttggcaaaggctctgaggttgccctgacacttgcacttccaatcggtatccttggtcttcagatcaagaccgttctctacatttttattgtaggtatgtttgcaaaaaccttcgaccgtctggcggcagaaggaaaagaaaaacagatcgttgctcttcactatgggctctgggctgtaaactggtttttatattccttgttcgcatttttcgggatcctgttcggatctgatgcagtcagtgcacttctggatgccatcccggatgttgttatgaatggtctgacagtttgcggcggacttcttccggcagtaggtatggcaatgttaatgaagatgctctgggataacaagatctgtatgttttatttcctgggctttgtccttgcagcatacttaaaccttccgctgatcgcccttgccgtgatcggtgtgatcattgccatttccattggtatgaacgattacaagctgaatcagcttgcagcacagagagtagcagtttcaccggccggtagcgctgacgaatatcttgacgaagaagaggaggaatttttctcatgagtaatttaacgaaatccattcctgcagatgaaagaaaaatgctgagaaaagcgttctggcgttcctttactctgtatgcggcagtaagcccggcaaaacagggagcttccggcttctgctattccctgatgccttttatcaataaattttacaaaaacgatgaggaaggcaaaaaagctgccctcacaagaagtatgtcttacttcaatacaaccatcaccttatctacattcatcatgggtcttgtggcatccatggagaagaaaaacagcgagcagaaggattttgatgcaagctccatcaatgcggtgaaatcttccctgatgggacctctggccggtatcggtgattccattttctggggcgttctccgtgtaatcgcagccggaatcgcagtaggacttggtgcatccggaaacgttctggcaccgatcgtgttcctgcttcttttcaacattccgtctattcttgtgaaatattacggaacattcctgggctacaagcttggttccgaatacatccagaaggtttatgcaagcggtcttatgaacatcctgacaaaggctgccagcattgtaggtctgatcatggtcggcggtatgactgccagcatggtaacctttaactccacttatgaactcaccatgaagggtgaatctgttctgaatctacagaacatgttggaccagatctttatcggcattgttccccttggactgactcttctgtgttactatctgctgaaaaagaaaaatatcagcatcacagttctgatcatcggtgttatcatcctgagcatccttctttctcttcttggaattgcataaaccttaaggataaagatcagaactatgaaaaggcggaccccaggtggtccgcctataaaaaacctgaaaaaaagttatattgaaataactgactgcaaaaagggcagttgaagagtatctggcgggatataaataagcggcaaatacggattataaatatctgctcaatgcaaaataaaggagacataagaaatgaaagattggtggaagaattccgttgtatatcagatttatccaagaagctttaaggactccaacggggacggcttcggcgatctcaagggtattattgaaaagctcccctaccttcagaaccttgggatcgatgtgatctggctcagccctgtttttgactccccacaggacgacaacggttacgatatcagtgattatcggaagatctacgcgggcttcggaagtaacgaggacatggatgagctgatcggaaaagctcatgagcatggtatcaagatcattctggatcttgttgtcaaccatacttccgatgagcatgcatggtttgtggaaagccggaaatcaaaagacagcaaatacagtgattattatatctggaaggatccaaaagcagacggcagtgagccaaacaactggggctccagcttctgtggaagtgcctgggaatatgatgaagagcgcggccagtattaccttcatttttacagcagaaaacagccggatctcaattgggaaaatgaaaccgtccgtaaggaaatctatgatctgatgaaattctggatggacaaaggtgctgacggatggcgcatggatgtgatcgcatctatctccaaggatcagtccttcccggattacccgaaaacggatggccgcaagtattatacaggaaaatatcacagcaacggaccaagacttcatgagtttatccatgagatgaaccgggaggtgctttcaaaatatgactgtatgacggtaggtgaggcgccgggctccacaccggaggttgcaagactgtttacagatccggagcgtgaggagctgaatatgatcttcacatttgagcatatgaacatcgaccgtattccgggctctgtaaaccgcaagtgggaattgaagccttttgatctccgtgatctgaaacgtgttatgagtgagtggcagaacaagctttataacaagggctggaatgctctgtattttgaaaatcatgaccagccacgtgtgatctccagatggggaaatgacactacttaccgcgaggaatgtgcaaaggcttatgctaccgttctccatggtatgcagggaactccttatgtatatcagggagaggagatcggtatgacaaacgtgcagttcccgctggaggagtacgaggatatcgaggttcgtaatgcatatcaggatcttgtcgttaagaacaaaaccatttctgaggatgatttccgcaaggcagtatggaacaagagtcgtgacaatgccagggttcctatgcagtgggatgacagcgaaaatgcaggatttacgaccggtaagccatggttccgcctttctgatcgttaccaggagatcaatgtaaaaaaagctctggaaaaaaatgattccgtgttttattattataaggatctgatctgtcttcgtcatgaggaagagcttctcacagaaggtgactatcagctccttcttccggaagacgagaagatctttgcatatttaagaacttccgacaaagagcagtggatcgtggtggcaaacctttctgaggatacggtaagtacagaaggtcttgcaaaatatgtgttcgataaagaggatattaagattgcaaactataaggacagaacaggaatcaaagcggacttaagaccgtacgaggcgtttatgatgagaatccggtaattcctgagctgttgtatatgtagtagtaaagtggaagaaaagtctccgctttacagagagcaggtatgagtatttgtgcgtatctgtactgccaaaggatatccgggtgcagtgcagatacgctttttgcctgtggggaaaagacaaacaggaggaaattatggaaaaatatatcattgcagtggatatggacggaactcttctgaacagcgagaataagatttctgaaaggaacagaaatgttctgcagcgtctgatcgatgacggacattatgtggtgccggcaaccggaaggaccagagagctgatccctcaggagttttctgtgctccggggtgtgaaatggggaatcgtggaaaacggctgtgttgtctgggattacgataaaaatgagatgatttggcgaaaaaccatgccaaaaggaatggtaagtaaaatcctgaaggatgtggaaaacagtggcgcaaaaggctggatcgcagaggcttatgcaaacggaatcgcctattctgatgcggatgccagagattatgtggcatctgtagcggataaagctctgctggaaaaaacttttgtagattattttctcagcagacatgaatatgttaaggatttttatcatcaggaagatattctggatcaggcagagaagatcaatatttattttgatgatatggagaccagcagggcacttcgtgagaaatggaaggatctggatgatgtggcagtgactacttctatcagcggtaatgcggagtttaatgcagcaggcgtggataagggtgtgggtcttgccatgcttcgcacaaagcttggtattgaccggatgcatgtgatcgctttcggagataatgagaatgatctggaaatgctggagggtgcaggtatcggtgttgctatgggcaattccaaacagtatgtaaaggatgcagcgaatgaggtgaccggagataacgatcatgatggtgtggcggaatttctggagaggtttttcgggctgtaagctgtggttgatcgtgatcgttgatataagggacagggaaatgtatttttctctgtctttttttatttgcatttttggtgatataaggtatgataaacgaagaggatacggggattgctggttttgactggtagttaccggtgaaaattatttgaggagatcaggaggatattttttaatgaaaaatctgataccaaagcgtgtgatggagtatatcattatcacatttgctgttgttctgatggatgtggggatttatgtatttaagtttccgaataatttttcctttggtggtgtttcgggtatggcggttgtgttttcgcattttattccgatgacgtctgcgcagatcaacctggtgatcaatctgattttgctggtgatcgggtttattgttcttggccgggattttggagtgaagacggcttatgttacggttgtttcttctttgcttctgaatgtgtttgagaaggtttttcctatggacagggcgctgacggggaatattatgctggagctttgctttgcgatcattttgccggcgctggctgcggcgctgctgttttttgagaatgcttcgggtggtggcacggatattgtggcgatgatcattaagaagtattctacgatgaatatttcgggtgcattgtttgcggtggattgtgtgatcgttgttgtttcgtttatggtgtttgatcttactacggggctttgttctgtgctggggcttatggctaagacgttgctgatcgataagtctattgagaggatgaagctgaataagtattttacgatcatttccagtaagccggatgagatctgtgagtttattatgaatgggctggatcggagtgctacggtttatcatggggagggtgtttattcgcataaggataagaagattattctgacggttgttgatgtgagacaggcggtgcttctgcagaggtttattgatgaggtggatccgcaggcgtttttgatggttactaagagtagtgaggttgttgggaaggggtttatgagttatatttgatgcgatcgtatggggttgtatgctgatcgtaggtgattgtgtatgattgtaagctgatggaaattaggagagcgttctttgcgggctggatgggctgcggggcgctcttttttgtggtggatggtggatggcggatggcggatgccggacgcctgggagacgggtgccggtttgctccgggcttcgtcgggggctggcttctaggctgccggaattctgctaaaaccgtttttaaaaagtccgaactcgcggcttgctgccgctcagacagcggactttttaaaaacaacgcagatttccgccagccaagaatcagctcccctcctgcagagtcgtagccaaccggcacccgtctccccggctgttcggttccgggcgggaggtagtggtgggggtgtggggcgactggcggaagtggggattgatgagggctggaggattgagtggattcccgggagttggatgagccatcagcgctgcgctggatggctgggaggaaaggctgagtttcttgtggaagccatcgtcgctgtgttggatggctgattggtgtgtgaaggttttgtgaaaggggtttgacaggtggaggtttttatggtaggatacacacttgcgtaacaaatttaataaaaatgtaacaaaatggcgaatgaggagcgtggcgaagtggattgtgaatgtctgcctgaatgggtgggtgctgctgcgtggttttctgagaggagttttattgtttatgttttataagaaatttgctgctgttgttctgagtgctgttcttgtgggtgtggttccttctgttgtttttgcggatgcggatggtatcagtgctgtgtctgatggagatgtggaggagctttctattgaggatgatttttcggatggtgcggattctatttctgcttttgccagtgctctggcggataagacggtttctgaggttcaggggtatcaggaggcgaaggctgaggctgaggtgatcgcacaggagaggcttgaggctgaagcggctgctgaggctgcgcgtaaggcggaagaggagcggaaggctgctgaggaggcgcgtctggagatgcggcaggggattgtggattttgcgctgcagtttgtggggaatccttatgtttatggtggtactagtctgactaacggggcggattgttcggggtttgtgatgtcagtgtttgcggagtttgggtatgagcttcctcgtgttgctgcggctcagtgtgcggcttccgagaagaaggatgtttcggatattgaggctggtgatctggttttttatggtgatggtggtattgatcatgtggctctttatattggtgatggcaagatcgttcacgccagtacagcagctacagggattaaggtttccgactatgattaccgggctccggctgcggttggttcgtttgtggcttaggatatagatataaatgatttactgatatgaaatataaactgtctgcggagattttttggttgggttggctgaaaaatagctgcaggcagtttttttgcagaaaaatagtgtataatttaaccgaatcaagtaagtctcctgcgggttgcgaaaagcaataagcagtgggtggggactcgaaaaaaattcagaaaggttgtggggttatgaatacgaaggaaatcagtggcaggcggcagatggagtttttgacggggtttgattttgtcagagaagcgggtactgcgggggaagtgaaggcggcgaagatgatccgggatactttggacagcttcggagtgaagaatcggatggaggagtttgatttttggggttttcggatcaatagagcggtgcttaaggttgtggagccttatcagaaggagtatgtggtgaccgggtatggaagatgtggaaatactggggcagaaggtctgaaagcggattttttgtatgtggagaatggggatgctgtcagtctttcccgggcgaagggtaagatcgttatggtgaatggccgggtgagtggtgatgtgtatcagagactggtgagcgccggagctgttggttttatcagtgtggagggttctccgctggatgaaggagtggacagggttccctgtcagcgcagcctgccgatgatctttccgggggatgcagcagaagtgatagaaggattgtcggagtctgcagaggatattcacgagatgcaggaaaaatatagtggcaggattccgggggcgaatcttcattataaggatgcagtggagctggtgacggagggtgcgtctgaggtgtgcctggttgtggaacaggatgtgacggcgtgcagatcccgtaatgtagtggcgaggatcgaaggtacggataagaaagatgagatcttgacgattacggcgcattatgattcggtgccggagggaccgggggcctatgataatatggctggggcagcgatcatcatggagctttgcagatattttcagcagtatagaccgcgcaggactatggaatttgtgtggtttggtgctgaggagaagggcttgctgggcagccgggattatatcagagttcatgagagtgagcttggagcgcatcgttttaatatgaatgtagatctggccgggcagctgatcggaggaaatgttctgggagtgacgggagaggcttctgtttgtgataagcttcttgagatcgctgacggagcagggatcggagcgtctgtgaagaatcagatctggggaagtgattccaattcttttgcatggaagggaattccggccatgactctgaaccgggatggttttggcatgcatacccgttatgatacgattgatctgctgtctgcctggtcgctggagagaagtgcgatccttctgggatgtattgcagatgaactggggaatgcggaggttttcccatttgagagaaagatgccggagaaatttatcggagagctggatgaatatatgtgcagatagtaaaaatctgattttatctgctcataactggatatttgttatggaactgtggggacttgtctgtttcgggaagagtacagacaagtcctcataatttattcaatattttcaatgtttattgacctttataattccgcaagggaacatgtggctttgagtcagggggatatttgcagctttgtaagggattcccggaacagggggcaagcggaggttcgcaattgaaccagtggaattacttgatttgatcaaaatacgataaaacaataaaaaataatacaaaataattgacagtaagatatcgaactgttatactgaaatcacaggctttccagggatcaatgcgccggatattgttttgcggagtattgatttctggaacttttatcacagaaaaatcaggaatgaggagataggaccatgtttacagaagaacgacagaatgcaatagagaaatgtctccgcgaaaaaggaaaagtcagggtcaaagaattaagcgagatgtttcaggttacggaggactgtatccgcaaggatctcaagatccttgaaaatgcaggcagattaaagaggacttacggcggagcgatcctgtcacaggagtatcctctggagagaaacgtagtagacaggcgtatgtacaatcttgataagaagaaagtgatcgctgcgaaagccttcaagctgattaaaaataacgaaacgatctttctggatgtttccactacaaatatagagctggcaaggcttatcgcttcgtcgggtatgcatgttgtggttgtcagcaatatgatcgatatcctgcagatccttgctgcgaatccgtccatcacggccataggcacagggggaactatgtaccattcggtgaatggatttatgggagctgcggccattgaggtgatcaagcagtacagctttgaccgggcatttttgggaagctgtggcgtggatatgacagattttgcagttactacatccggagtggaggatggattgaccaagaaggcggcagtgcagagcagcagacataaatatgtggttatggagagagagaagttttattttaacgaatcttataaatatacacattttgatgatatcagcgggatcattaccgatgaatttccggatgataccattgtgaacatactgaggaataccggagtgaaattactctgagcagacagtaataaaggggggatttttacatgaaagactatattctggaaacctgtgtggattctgtggaatccgccatggcagcagccgagggtggtgcggacagattggagctttgcagcaatctgatcatcgggggaacaactcccggcccatggctttttgaggaaataaggaagcgttcggatatccggattcatgcgctgatccgtccgcggtttggagatttctgttatacagatgcggaattttctatgataaggaatgccgtaaaggatttccgcaaaatgggagcggagggtgtcgtggtaggtatcctgaaaccggatggcaccttgaatatggaacagatgcaagagctgatggatgcggcgggagatatgtctgttacgctgcacagggcttttgatgtgtgcgcagatccgatcgaggctatggaacaggcaatctcgctaggaatcgatacgatccttacctccggacagaagaatacctgccttcagggtgcggagcttttgaaggaactggaaaccaggagtcagggacgtatcaccatccaggcggggagtggcgtcggtgcggaagtgatccgccagctttatccccttaccgggatcaaggcttatcatatgagcggtaaggttgtaacggacagtgcgatgcagtttcgcaaggaaggtgtcaatatgggccttccgacattcagtgaatatgagatatggcgtacagatattgaaaatgttcgtgctgcaaagaaagttctggaggaattataatggctgaggggaagatttttctgaaagaaaaccgtgatcggattgaaaaaaaatatcgggagcagatgatggggttaccgcaggcttttgtggagattgataaaaagcttgcggaatgcacagacgaagtggctctggcgtgcaaatatttatatgcgttcatgccgtacagtgatatcggaaattacgcgtttgaagtatttctggattatgcggagaatggcgtacatttatggaaggaaaactccggggtggcagagctgccggaggaaatctttttgaattatgtgctgtttcatagagtaaatgaggaggagatcgcaccctgccgtacatttttccgcagggagatcggagagagaactgagggaatgagcttccgggaagctgccctggaggtgaactactggtgtgcacaggaggctacctatcattgtacagatgatcgtaccctgtctgcacttgccgtataccgcagaggaaacggaagatgcggagaggaatctgtatttaccgttaatgcactgagaagtgttggtgtacctgcccggcaggtatatgcaccaaagtggtctcattgtgatgacaatcatgcctgggtggaaatctggtgcgatggaagctggtattttctgggagcctgtgagccggaggagatcctgaataagggatggtttaccaacgcttcctcaagggctatgatggtccattcaagagtttttgataccaggatcccggagggggaagtgatcggcaaagatggtatggtgactatgctcaacgagctgaaacgatatgcactgacaaaagagatcactgtgtccgtaaaggattcacatggaaaaccggcagaaggtgcagaagtttcttttgaggtgctgaattattcggaatatgccccgattgcagaactgaaaaccgacagtctgggaaaagtcagcctgacaacagggcttggaagtatccatatttctgcaaggatgtatgcagatggagaatggctgcatgcagaaaacagcatggatacaaaaacagaggattgttgtgagatctgtctgatgcccgtaggaaaggaaaagggtattttttatgaggagtggacggagatcgatatgatcgcacctcatgatgcgcctgtaaataaagatatgccaacaccggagcagaaagaaagaggcagcagacgtctggcagaggcaaacgcttacagggaacagaaggtaagaaacctgagcaatccggagtgccggaaattcctggaaaaagaaaccggagattcttcaatgagaaaaaaactccttgaagtcctcacagagaaagacagaacagactgcatcagccaggttctggaggagcatctgaaatttgcattaccgtatgaaaaaagcatggatgcagatatttttgtaccatatgtactgaacccgagagttgacgatgaagttttgcagaaatacagaaaagcgatccttgagcagctgtcggaagaagagaaaaatatgctgcaaaaggagccggcaaagatctggaaatggattgaggataagatcatttccagcccggagaaagaacgcagcagtgtgatcaccacgccgtccggatgtctgaaaacgggaacaggaagccttctgtcaaaaaagatcctttttgtggcaatggcgagaacactgggaattccagcacgcctgaaccctcatgaccgttccatggagtatatgaaaaacggaaaattcatcccggtatctgcggaaacagagaaaaacgcatcgatttttctgaaggcaagtgaggatacacagtggaaatatttccagaactggagcatcgcaaaactggaagccggaaaatacagcacactgaagctggaaaccgaaaatttcagagatcagatgatgaagctgccactggaagcgggaaattacaggatccttacctcaaacagactgccaaatggaaatatatttgccacggagtattattttgaggttcagatcggagaaatgaagagggtggagctggcatttcggaatgcaaacctggaagacatgctggagaatatttccataccggaatttactctcagaaaagaggatgggagcaccgtgaaggcgtcagaactgacggcagatgggaagcatatcctggcgtttctggaagaggagaaagaaccgacggagcatatcttaaatgagatgatggagcaggaagaagctttttcccgatatgcgaagaggatcatttttgtagtaaaaagcaaaaaagcgctggagacacctaccctttcaagagcactgggcaagcttggaaatgttcagatcttatatgatgattttttagagatcatcaatacactgggaagaagaatgtacgtagatccggataagcttccgctgatcattgtgacaaacggaagtctgaatgggatctatgcaaccagcggatacaatgtgggaaccggagatatgctgctgagactgctgtgacagatataacggatatatacagaaggaacacaggccgtatcatcgactgtgtcggtgacggtctgtgcctctgtaaaagctgtgaaattattgcagtggttcagatgttcagaatatgaaggcagattggaatgagaatacctgttgtacttcccgaaactgccgtaataaaagttgttttgcattacttaccatcagaaaagaggttacgcacagaatcccggtaaatgcattccggcttcaggcgtatcgtccttggaaaatcactgtagtctccgttcattctgcgaagcagcagatcacaggcctgctctgccagaccggtcagcggctgacggacagcggtcagctgaggagaaagcagcatggacagttcaaaatcatcaaaggagacaacagacaggtcttccgggatccggatgccaaggctgtagatcgcttcataaataccgaggcatagtgtatagttcgcagaaaatacggcagtcggacgttccggaagattccataatttctgcattgcctgatatccaaagtcgtttgcgtaattttcagcgatgatataatcggggttaacaggaatatcgtagtcttccagtgcccggagatagcctttttttcgttcgcatgcggtataggatgcaggagaaccggtgacaagggcgatcttctgatgccccatttttatcagatgctccacgatctcgtaggctccggaggtacagctggtctgtacacagtctgtacggtggaaatggctgtgttcttccagctccacaacagggattttggcgtgttccacagcagaacagatgtcctgattcagactgaaagaggtaatgataaggccgtcgatcccagagcggagcatgtgagggacgaatttattgacatgatccttatatttgtcgccgctcataaatgtgagagaataaccgtgagcgcgcatggtgttttctattttgctcagaagaaaagcattatgcggagtattgggaggaccggataccagaccgatacggtaagtcttggaggaacgaagtccccgggccgtatttcgtggaacgtaattcagtttccggatcgcttcgtcgatctgctttttgttttgcggccgtacagttccgccgttgatatattttgaaatggtggccagtgccagaccggtttctctggcaatgtccttgatggttgcactcataaatcaatcctttccggatgctgtactgttgtgttcggacaggtcttttacggagcgccgcgggtggaatacaacatccagcatgtctatttttggaaaatccgtatagtctccatggatcctttttaaaagtaattccacagcatgtttccccatgcttgtcagatcctgtgagacgcaggtcatagtcgcgctcatggtcttgaaaagcggatcatcatcaaagcacacaaaggaaatatcctgaggaacggaaatccgtgcctggctggcagcgcttaaaccacccattgcggagagatagcagttaaaaaaaacagcagtagggggatcggaagaatcaataagcttctggaaatgttggttgctccgggctatcgtttctgcagtggaagcaaaagaaacagggggaaaagaatcctgctgtttcagaaggtcaatgccatttttctgatatacatccacaaagccctggatccgctgctcgatggtgtaggcgtccagatactgttccatgatccagacctttgtgtggcctttttccaaaaggtgctctgccagcagtgcaccgcctctgtaattatcagaaataacacagtctacaggaaaatgtctcatggaagcaggaatctgatcgagcattacaaccggtatgccggcattctgtaaaagctggtacaggtcatcatgccagcaggatgggagcatgataactccgtcaaagtgctgggagataatatcctgtatcgtatcgatctccttctgatgttcaaaaaagaaagaacagacaataactgtatagccatgatccgtgaaatgcttgataatggagttgacaagctcgccccagaaataattaccaagatctgagatcaggataccgatggtatgtgtgtttttggcacgaagaagctgggcattccggtttggggtatatccaagctcctgaattgccttttctataaggatacgattttcttcccgtatttttttgtggtttatatatttggagatcgttgcggtggacaggcctgtcgcacgggcgatatcattgatcgtaacgttcatgtaaagcctccggttctgatgcatttacagataatatagtattttcatattatatcatgaaaaagaaaatgcctcaatacacatggcattttttacacataaagtatcagaaaaaacgagcgtattgtacataaaattgataaaaatgaaacgtttaacaaaatctgatacaaaaaagtacacaaaaataagacggaataattgtaaaaaataggaaaaatgatttttgccctatgattttacttgaaaagctgcttcggatgcggtaagatagtcttaacaaaaaacgaaacgttttacgtaacaagaaaatcagctatacgaaacaaggagaaggaaaaagattatgatcatttatacaggaaaagattactatgacgtaagcagaaaagcggcaaacatcatgtctgcacagatcatcatgaagccaaatgctgttctcggacttgctacaggctccacaccggtgggaatgtacaagcagctgatcgagtggtacaaaaaaggagatctggacttttcgcagatcacatccgtaaatcttgatgaatacaaaggactttccggagataacgatcagagctatcgttattttatgaacacaaatctgtttgaccatgtaaatatcgataaggcaagaacctatgtgccaaacggactggaagaggacagtgagaaagcctgtgcggattacaatgagatcatccgcagtgtgggtggtattgatatgcagctgcttggaatcggcggaaacggtcacatcggcttcaacgagccgggtgcagcatttgagaaggagactcactgcgtagaccttacggagagcaccatcaaggcaaatgcaagattctttgagactatggatgatgtgccgaagcaggcatataccatgggtatcaaaaacatcatgactgcaaagaaaatccttctggtcgctaccggagaggcaaaggcagatgccctttacaaatctctctacggaccgatcacgcccaacgtgccggcatctatcctgcagcttcacccggatgtgacggtagtggccgatgaaggcgctttaaagctgatccgtgagaagggactgctgtaagagatacagaggaaatttccgcgaattaaatgaacgcagatcacggatatccgtttgagtcaagaggatatcagcgatcactcatgggattttcctgatttggttaataaagaaagcttcgatctaactctcatcgatgagcgatgtgctcagagagtggatcgaagctttttgtgctttcgggacgtaaacctgcaggtggctgcaaacaggccggtgggccggacatttgcagtctcaggcttttttcaacgttttgtgataaatcatgacagaaacgatggctgtaaacacctctgtgatccagaatgcgttccacacgccatcaggacccataaaatgtgacagaagatatgcggtgggcatgataacgaccacatagcggaaaagggaaattacaagggactgcgtgccttttccaaggccttccatggcaccggaagtggtaacggatacagcagaaacaagaaagccggcgctaatgatcttcagtgctctggagccagcggcaatggtttccggggtagttgtgaaaagtcccataagctgtccggatgccaggaggcagataacgtttccaaagagcatgatcacacagctggattccagggtgagctggaagatttttttcacacgcttcatctcacgggcaccgaagttataaccgatcagcgggcgcattccctggatgattccgttggccgggagatacaggaaggtctgcagtttgtaataaatgccaaggatcaccacatagctgtccgagtaagcggccagcacggagttcagaaaagagatcagaaacgatggcagtgccaggttcaggattgcgggaacaccgatggcatacaggctcagatccgtttctttgcttgttttcagggctttgggcgttacacgtacaggaataggcttcaggatataaaagaccatatagaccgcaatggtgagcacctggccgatgccagtagccagagctgcgccccggatacccagcttcgggaaaaagccgattccccagatcaggaacgggtccaggatgatgttgctgatacatcccacaagcagggcgagcatggatactttcatccgtcctacagcctggaaaagtttttcgaagaaaaggctgatggcaattactgtggaaaacaggaaaacgatggtagaatactccagccccatccggatcacggtttcatcctgggtgtacatctgaaggaatacgggcataacagcaatgctgatcacagtcatcaggatcccgtggatcacagacagaaaaaatccgtgggttgcggcagtgtctgccatttttttgtcccctgcgccaaggtgataggaaactctggcgttgattccgatcccgaagccaatggcaacggcgttgatcatgttctggatcggatagacaagggacagggcggtcatggcctgctcgctgatctgtgccacgaagaagctgtccacaatgttgtatagtgagtttacaagcatggaaaagaccataggcagcgccatggatgccagcagcgggccgacaggcttttccttcataaatgtgctgttcatgaaaaatccccctttatatcagaatcgtaagaatatcaggtgcggaaaacagagcgtgttttttgtgcataataaaagccacacaatctgtcttctcgaatcggacagattgtgtggcgaaaaaagttcaaaactgaaaaatccacacgttgttttagtgttttcacattaacaaaaaacagtgctgatgtcaagaccgcacgcaggagaaacaccataaaaagctgcaaaaagaaaggcttgatataaaatcggagaggattggcaacattagacaggtgcgtgcggatacgggcaatatcagccctgaaaaggtcgttctggcaatatgcacaaaacttgtcgaaccatggtggataagtgaaaaactttccaaaaagttttccacatgacaaaaatccgcaaatccgccaataatcaagttatgcacaaatttatccacattatccacaaggataaccatgtggatgacctgatttacataaataaatttaaacatatgttttgtgtaaaatgataaaattgtaaaaaatgggaaaaaagtttttaaaactattgacatttttaaattctaaatatcataaaatttattgcaaaaaagacataatataaaagaataaaaacaaataatcagataatagcaaatgaattcttgaaaaactaatctatttaaaaaggggactatcggatgtatggaaatgaggataaaaaagaacagtgcccagttaaaacgatcactgcaaggtgttgaaaagtcattttcaggtgtggataaatgtggataaccaaaaaatcctccgcagaaccggaaagatctgcggaggatttttttaactgttttgtttcatacgtttgatcaccttcagacgtgtaaactcttcacgctctttttcctccagagcattggtgatatctctggtgagagtttcgtatctggggatggtgatgttcttcagcgcattggcacgcttctgggtttttttgatgttggtggcaagacggatggcggcgttttcgatcatggagagctggatggacagctcctttacacgctcgaaggctgccttggcctcgtccagggacagcttggtgctgtagtaggcgtaggtcggcgtgttgcctgcttttttgtcatattccacaagagggatctcggttcccatgacactcctggttttgatccggatggaatcttccacaggaacggtatgagagatctggtctacgaaagcgattccgatttccatatttgccttctgaagagccgcataagcggtacggaaggtctcatcgatctgggactggatgtcctttgcctgatcgatcagctccatcatttcacggatcaggatattacgctttttgtccataagctcatagccctgtttggaaagagctagagagttttttgcaagtatgagatttcccttggtgggaaaggtattcggatccataaaatcacctcactaacggacggtttctctgtaatactgatccagaactttggtatcgatacggtcgagctcttctcttggaagaaggccaagaagctcccagcccttatccagagtttcgatgatgcttcgattctctgtttctgactgtcctacaaattctgcctcgaaggcttttccgaatacaaggtactgcttatccagcggagaaagctcatcctcaccgataacggatgccagagctcttgcatcgcctacctttgcgtagcaggagaagagctggttggcaacatcctgatgatcggcacgtgtgaagccttcaccgataccgtccttcatcagacgggacagagatggcagaacattgatcggcggatagatcgcctgaccgtgaagctggcggtccagtacgatctggccttctgtgatatatccggtaaggtcggggatcgggtgtgtgatgtcgtcgtttggcatggtcaggattgggatctgggttacagaaccggtgccgccacggacgattcccgcacgctcgtaaagggttgcaagctcactgtacagatatccgggataaccctttcgggaagggatttcacccttggaggaggaaacctctcgcatggcctcacagaaggaggtgatatcagtcaggattaccaggatatgcatgcctttttcaaaagcaagatactcagcggcagtgagggcaatcttcggtgtcagaagacgctctacaaccggatcgtttgcaaggttcaaaaacatcacaacgtggtcggacgcaccgctttcttcgaaggtcctgcggaagaattccgctacgtcgtatttcacacccattgccgcaaaaacaatggcgaatttttcatcggagtctgctcccagggaagcctgctgaacaatctgtgcagccagcttatcatgtggaagaccgttaccggaaaagatcggcagcttctggccgcggatcagtgtggtcagtccgtcaatagcggagataccggtgttgatatagtttcgtggatattcacgtgttaccggattcagcggaagcccgttaatgttcaggctgacctccggtgtgatctcgccaagcccgtcaatgggctggccgataccgttaaaggtacgtcccaggatctcaggagaaagcccgatttccataggatgtccggtaagacgtgtgtgtgtattgccgagggacatattgtcagttccctcaaaaacctggataacggccttgtcctcatagatttccacgatacggccgatcttttgagtgccgtcctccatgtggaattccacgatctcctcgtaagatgcgttttttacaccctcaaggacaacaagagggccgtttatttcactcaggccaagatattcgattgccataaactgatccctcctttaaccgtttctttccagtacattgtcgtagaagcggtcgatatctttatgatattcatcaaaacgctccggctctttatttggaacctcgtatttgatggcgatgatacgttcaaagatcttatcctccttcagcacggaaaccggcatgccacggtttacaagggcacggcacttttcgtagagatagaggatggtttccatcatcaggaactgcttttccataggaacactggtgtcctcctggtgaaaagcgttctgctgcaggaagcccagacggataaccctggcgatctccagcgtcagcttctgatcatccggaagaacatcgcttccgatcagcttgacgatctccataagagagctttcctggttgaggatagccatgatctggtttctgtcataaacgaatttcggggagacatgctctctgtaccagggagtcaggtcctccagatattcgctgtagctggtcagccactggatggcagggaagtgacgggcataggcaagagccttgtccagtccccagaaacagcggacaaaacgtttggtattctgtgtgaccggctcggagaaatcaccaccctgaggggaaactgcaccgataatggatacggaaccctctgttccgttcaggttctgcatcattcccgcgcgctcatagaaggcggaaagcttacttgccagatatgcagggaagccttcctctgcaggcatctcctccagacgtccggaaagctcacggagagcctcggcccatcgggatgtggagtctgccatgatcgctacatcataacccatatcacggtaatattccgcaagtgtaacacctgtgtagatggaagcctcacgggctgcaaccggcatgttggaggtgttggcgatcagtgtggtacggtccatcatcaggtttccggatttcgggtcgatcagcttgctgaagtcctcaagaacctgtgtcatctcgtttccacgctcgccacagccgatgtagatgatgatatctgcgtcagaccacttggcgatctggtgctgtgtcatggtttttcctgttccgaatccgccgggaactgcggcagtgcctcccttggcaatagggaaaagggtatccaggattcgctgaccggtaaggagcggaacgctggccgggaaacgcttgtaggtcggccgtggaacacggattggccatttctgggcaagtgccagttctttttcagttccgtcatcaaggcggatggtaacaatgggctccagaacggtataggcaccgtcaggagctgcatggataacggttccgtgtgtgatcgtgggcggaaccatggatttgtgaaggatggaggcggtttcctgtgtctcggcaataaccgtgcctgcgccgatgacgtcaccttcctttacggtaatgtgggtttcccattttttttctgtgtcaagagagtcaacgctgacaccacgggaaatatattttccagaggcctgggcaatctctgccagaggtctctggataccatcaaaaatattgtggatgattcccggaccaaggagaacggaaatagcgtctcctgttccgataacagtttctccgggtttcagccctgtagtttcctcaaaaacctgtatggtcgtcatatgtttcttaagaccgatgacttctccaaccagtttttcagggcctacatagaccatctcggagatcttgaagccggtgtcgcccttgaggtagataacaggaccgttaacaccgtagataatacctgttttactcatgtgctggacctccgtcaaatttgaattctctgtaagctgcctgatagccttcctcaaaggaattgtcgatgaggatatttttttcagggattatcgccttgatcccgccgataaaggattcatcggaaaccttcagcgggaaaccggtctttacagtgagagacttcagacggggttcatcttcttttgaaagatagatctggatctcatcgtgttccgcgaagcagacagcttcctcgatctttgtacaaagatattcttcatagcggggagattccatgaatttcaggatctgtacccggacatctgcaaaaagtttttcttttaagcggctctgtctggcagtccagtttcgccggatgtgaagctgctctgcggaaagtgccttgttgatctcacgctttgcgtttgcgatctcggctttgcgggaactggcagcatttcccagagacatttttttatgttcctccaatgcggcatccagggcttccttgtgttcctggacatctttttccgcctgacggcgtgcttcgtccacggaggtgtcatagaagtgtttaagcttctcttcaattgtcataatatcacctgcctataattttaatccgatggcctcatttacataagatgtaatgaaatcaggtctgcggccggtaccatgtctgtcaggaatttcaatgatgagaggtgttttgtgatgaagtttgacatcatcaatgatctcaggaaactcccggccgaatttttcggtcaggagtatgattccgatctctttgtctgcgatggtgcgctccagagcttctttcagctcgtcgtgctcatgaacgatcacaccctctacaccggccagtctcattcctgtcagagtatcaatattgtcactgatcagatacattttcatatcaaagtttacccaggatcatgaaggagatgatcagtccataaagagcaacaccttcggcaagacctacgaagataagagatttaccaaggatgctctgatcctcactgattgctccaagtgctgcgcttgccgcactggcaacggcaataccaccaccgatacaggaaagtccggtaacaagtgctgctgcgatataacccatacctgttgcaaggcctgcgtcagcgcctgtagcagcctgtacggaagctccgcctgcaaatgttactgcaatggcaacaagcatgatcccgaagaagaaaaaggcgttgacaccaagagctgttttgtagcggccgcggcttttttcgccgagaagataataaccaaatggaagaatgatgctgagtacaagtgcaactgcgattgtgatctgtgtaatgactgtcatgatgatgacctccttaatattcgtttaattgaatgcccggatcagaatgcgttccgactttggcattttatttgttttttgagcagaacggctcgaatttccgtccgctgcccttgtaaaaacggctgaacatttcgtaatattccagacggagtacctggatacctacgatcaggccctccatagcgcatacgaacaggtttccgagaatgatgacgatccagttcggactgccgttttctgcgcctgcaagcataagtacaacctccatcatagctgcgtggctgactgcaaaagcaccgatacgcacgaaggagagtgtattggaaaagtagctcaggataacctcgaacagttcaaagataccctgtacgataaacatgcctttttcttttggcataacctcggcctttttttctaccaggtttgtaagaggctccttgaagaaaataagaagcagcggtaaaccaaacataatggcaaggactgcaccacccggaactgcatgtccggatacaaagagtccgatgcagagaactgcggagccataaaatacaagtcctgccacagcgttggtgtcaaaccaggttttttcaacatcatgcgtcttaaaggaattgatgatgttgaaaaccatacataggaggatgattcccatgccgaagccgatggcaacgataaatacggtattcagttttccgataaaaggtatggtcgtcatactgtccacaggccgcagccacagagcaggtatgacatcctcaaatccaaagatacttccgaacatcagaccgaaaaatgtggaaaagactccggcgcagctgatgattccggcaagatcgatatgcttcagcttgtacaggagcaatcctccgataaagagcaggagtccctgtcctgcatcaccgaacatggctccgaaaataaaggagtaggtgatggcaacaaaccaggtggggtccatctcgccataggcgggaagtccgtacatttttacatacatttcaaagggcttgaaaagcttcgggtttttcagcttggtcggcggctgatggttctggtcgtgttccggcgtattggtatcttctccgtctaccaggcagaagattttttcgtcggatgagatatcggcttgaaaagctctggtgtcggcttctgtcatccatccgcagagaatatagaaattctcatgctttccggtgcaggcagccgctttccggacatcgaaatttctggaaaactgaagaagtgtgtttctggcggtaacgatggtttctgcctgatccgcaagaaatctctggtatttctgtttctgtgcttccagatgcttcagggcatcctcgtattgtttgcttacgcttgaaaatgcctgctgggcagttccggtataattatccggcacaaagatcttttcaaagtgcatagaagagtaggcggcatcaattttgtgcgcatcatgcttcggtacgaagtaaacgccccagacgtattggtcatcttcatcgcatttaaggaagatcgtgttcagattgtcgtaaatatatttcttgaatttctcataatactgtttctcgatacgtccgaaatgaaaatggatatacttcagatgaagtatggatgaaatatcataatcaatatttcggaagggacgtatgatccgcagtgactcttccagagaggaacatttttcttccagttcggactgttccttctggagctgatccgcctgggagcggatctcctttactgtggaaagtgctgtttcaatacccgggcttctgttggaagtggacggaggagttttcagctcctcataaatggtattgatggaatttaaggcatctctgtaggggttgacatccaggaaaggcgtcagactttctactgtggtcagctctgagagagcgttttccagatggatctcgtacttgcacaggtaggtgtttacaacccggtcgatatctgccttgggaccggtgatgcttagaaaattcattttttcaatcacgttgctacctcctggttattaaccgttgcgtatataacgcagggattgttctgggtccacgccatagcgcacgcattcaagggcaatggtcagacggttgacttcatgttctttgtgatataaataggaatagatgactgctacggaatagggatccttgcgtgcttcctgttccagtatgctgcgaagaatatagttataaaattcttccagactggcgacggtcagctgttcgtatttcttaccataataagttccattgaagatacgacggaactcttctggtgtaggggcctccacaagggtggtgatctcctctttgcggagcttgtagttcatggggaccagcaatgcgtaaatagcagccggttccatctgaaagcagcgtttggagcgctggatgaactgcaggttcagcatatcgaatttttcaccgtaagccttggtgatctgtttcagatcgttacctttgaaaagcttcttccgcacattccagatctgtgaaaaatacgaaaggtcaagtgccatgccgaagtcaaaaagcgtggcatttccacgttcgttgacctgagacagcggaataaaaaaatcatttcccttcagtgccgcaatgaattcatccatattggtgcaggcggtaagcctgtcaatgtccagcttggaatgatgtctgaaaaaatcgcggtagggagaaatatctacgggatcggtgtcccggtggtcaaagagattcgtcatgatttctttcaggacgcggatctcataacgcttcgagtaaagtgacaggaacgttcgctgttcctgatttgcaaagtggtaaagccttgaaaaattcaggaagatggatttcttcaggagtttttctatctgtccgcggtgaagatcattttcatcgagaccggaccagatattctgatattccggagtccgtttcaggtaggctgttacctgggggacattgggaagctgaacgatttcttccagctgctcatctgtcacaagcctgctctgcatggcgcggatcttggtggagagtccgctgtatgagaggacagagcccattgaatcacttcctttcccttcaggtttcggtaatgcctgttattttctgaaacagctcactgcaaagactttcgtgatgggcttcgtaataggcatccagcctggatagctggtcttcggtttctgcacgaagctcattgatccgggcgtctttctcgcgggccagatcttcacggatctttcggatctcgtcgctggtttctttttcaagtgaagcgtcgaattccttcgtctgtttttctgcttcttccgagagagcctgtttctgtcgcgcagcgtcctgcatgatggcattggctgtagcttcgatttccgaaagcttatttaggatttgttccatagcgccctccttgtttgtttattgtttataattgatttttatatgatacaccttttttatggtaaaaacaactaaaaaattgttaaattttttgcaattattgaataaatatgttcaaaaagagacgaaaaaaagaaatttgtttattagacgatgattgagttttgggaaaaaatgaaaaccgcaaaggggccgtaaagccacggcccctctgcacacccctcgggctttttttaggagttcttggttgtggcggtgtgaggttgttgacttgtgtatgtatgctgcggtgttggatgtgtgaggttgagccgatgtatgtggatgcggacggcgaggcgcgttgctgtcgcctggttgagagggtttgagtggatgcggatggtgttggaagtggacggcgaggcgcgttgctgtcgcttggttggttgggtttgagaggatgcggtggtgttggggtggacggcgaggcgtttttgctgttgcttggttgagaatttttttattttttgcttgcggcggggtgggggttacatgtatagttgagtattggaatgttgtttgataagaatcattgagacattattatggaaagattattggaggttgtttatgagattacgaaatattccgggtgctaaggatgctattttggattgtgagtgggtaattgatgagccggagaggtttaaaggaaagtggaatgaggtttttggagtgaagagaccgctttttctggaagttggtatggggaaggggcgttttctgatggatatggcaagacttcatccggagagaaattttgtgggaattgagatgtatgacagtgtgcttcttcgggcgctgcagaagagagaggaactggaagcggcaggagaggagttttccaatcttgtttttatccgggtggatgcaagattgctgccggagatttttgagaaggatgaggttgatgggatctatctgaatttttcggatccgtggccgaaggcgcgtcatgcaaagagaagacttacgtccagggaatttctggcaagatatgagaagattttgaaaaaagaaggaactgtagagtttaagacagataaccgtggtctgtttgagttttccctggaagaggttagggattccgattggaatctggaggtgtgtacctttgatcttcatcatgatgaggagctggtgaagggaaatgtcatgacggaatatgaggagaagttttcttctatgggaaatccgatctgtaaaatggtgatcagacagaaatagagggaataagatgcaggaagaaatttttgaaaagtatcctataccaaaggcatattttaagctggcacttccggttgtgttcagtatggttatctcgcttgtttataatatggtagatacgtattttatcgcaggaaccggcaatacggatctggtggcgggggttgcccttggatcaccgatctttaccctgatgatcgcgctgggagatattttcggacttggcggcagttcttttatttccaggctttttggagaaaaaagatacgaggacgcaaagcggatcagcgtattcagcttttatggcgcgatcgtcagcggtgttgcagttgcggctgtactgatgatcttcagaagtctggtattgggacttctgggtgcaagcgaggccacctgggagtatgcgtcacagtattatacctgtattgcactgggggcgccgtttatcattgttgcgctgacaccgtccaatcagttacgaacagaaggatttgcgacggcttcgatggttggttctgtacttggcgcagttgtaaacattattctggatccgatcatgatctttgtactgggctggggtgcggccggcgcagctacagcgaccgtgatcggaaatgtttgtaccgatattttctttgtatggtttcttattaaaaagagcaaaaatctttctgtggatcccaggggatttcacatttccaggtcggagataggagcggtttttgccattggtattccggcttctgttactaatctgatgcagagcatcggaattgcgttgacaaaccgcgcgttgctgggatttggtgacgataaggttgcagctatgggaatcgttatgaaaattaatatgatcgctgcgttggtcctggttggttttgcctttggtggacagccgctgaccggatacaattacggcgcgagaaaccgcacaaggttgaaagcaactttgaagtttgcatatcttcttgagggaggaatggcgcttgtactgatggcggtacttggattttttgccccgcagatggtaaagatctttatgagcgatccttccgttgtggaaaatggcgcgctgatgcttcggctgcagctggcgggaatgttgtgtatgggaatcgtgctgatcagcacctgtacgtttcagtctgcaggacaggctatgggagcttttctgttatcagtgagcagacagggagtggtctttgcggttgtactgatgatcgctcttaaggtggcagggtattatggcgttctggcttctcaggcaatctcggatttccttacggcagtgctggcggtggtgctggtatggcgctggtggaaaaaagtggatttctaagagtccgctttaaatactttgcgcaaatatcaggaaacagatcaggatattttcatataataaaatatccgtgatgttggaaaggtatttgcgcaaagcaggaggccataagttttgaaaaaaagaaaattcagatccatgcagcagaatctccatacggtaagccgcagcattaacagccaggctgcccagatcagaaattcgctgtcagaaatagaaaaatcactgaacaaaattgcatcaaatgaagatataaaaaataaaaaagaaaaaaataaaaaaaattaaaaaaaggtgttgactttcctcaaatcataacgtataatacaacatgtcttgaggaacgaacgaaacaaaaaacgaaagacaaataattaaataagcgtctttagctcagttggtagagcacctgactcttaatcagggtgtccagggttcgaacccctgaagacgcactaaaggcactgtttttgcagatatagagctgcggggacggtgtttttttgttgtgtttatgcgggtttcaggggttttgaggttttgtctggacggagtgatctggaggaaatggaccgagatgaaaatgtcgatcatcagatagaatcagaatgtctaatatagacaccatgattataggtatagatccttttgaataaagaaaggatggtatactatgggagtttgtaagaagataaaaaggagggccgggtcttggaagggacccggcagagtatgaaaagaaaaataagtaatgatctataagatgaaaaagctttgtgctttatttgattaataatataccgtcaaaatgtgatggaactgtgagaagcgttttaaaaatttgtgaggaaagtctaaatatcttataaagtctgataaactgtgaagcagttattcggtgtagagccgcgtagcgaagcggattgcgaatatccgcttgactcgaatcaagtaagtcccctgcggggggcgaaaagcaatagcagtcggtggggcttgtaagtatggaaaattctgaaatttgtacaaaaatagtgaaaataaataagacttttctaagccgatacggtataataaaccatagcataaaaatccggaggggaaatgaacgatgatggatgtgttacacaacgtcatatgaacaggtgcggaaatttttctggggggtataaatgaatatatctatattttatgtccagcggaaaatgtgatatccggaaagatggttcaattctgaggtattcagatgaaaagggaggagatggctatggagaaagtgtttgaggcgatcaatggagtgttcagctttatcggtccactgtctgattttctgtgggagttccccacgaattttgactggtacagcagtatcccgattctgggaaatatatcctttgcgatcatactacttcttgggtccgggatttttttcagtttcaggatcggttttatgcaggtgacttactttaaaaaaggaatcaggaccatgacggagaaacgtgttgtggaaacaggaatttcgccgcttgcatcgtttttcctgagttcagctatgcgtgtaggaccgggaaatatcctgggcgtaacaggtgctattgcagtgggtggaccgggggccctgttctggatgtggatatctgcgtttttcgggatggcagttgcatacatggagggtgtccttgctcagattttcaaggagaagaaggacgatgagttcgtaggaggtcttcctttttatgggagaaagcttcttggaaataaggtatggatcggtgtttttctttcggtattgtatattctgtatgcgctttgctgtctgccggcacagggctttaacgttgtttcatcagtaggacgcatggcagagatcgtaaccggaaaaaccatcccaagcggatcagccttctattatatagtaggtacgctgatcgtaatcctcacagcagctatcgcatttggtggaatcaaaaaagtatccaaatggacagatatgatggtgccggtgatggcggtgctctatatggtagtagtgttacttcttatcatattgaattttacccgtattccgtatttcttcggaagcgtgtttgcaggagcctttaagccggatgcattttttggaggtgtttttggaacggttcttgcacagggcgtaaaacgaggcctgatgtccaatgaggctggtcagggaacgatcaccatgtcagcggcagcagctgacgcaaagcatccatgtgagcagggtgtgatcgcttctctgggagtttttcttgataccattgtgatctgtacacttaccggatttgtggtagttatggcacattgttggacgggagcagatgcggaaagctggcaggctcttgataaacttcccaaatatacggagtccattgctgtgctgactccgggaactgcaatgaacgggatcgttacatttcttgtaaccttatgtttctgcctgtttgcatttacctgtctgcttggaatgatcagcttttcggaaatcgcagcaaaccgtatccgcaaggataagatctgtattaattttgtacgctgtatcggtctttttgttgccgcatttggtatcctctgtaatatcgcaggactggagcttggaaatctctgggcattttctgatcttggaaatattctgatcgtatttttcaacgtaccgatcgtttatgtcggtgcgaaatatgttttccgggcgaccagacattataagaagaatgacggtactccgtttacatcggaggtaattggaagaaatgactgcgcttactgggatgagcaggcaaaaaaagtagtgaaaaatttttccggaaaataaaaattccggcgggagataaaattagcattgtaaaagtgcatgtactcatttataatgagtaacagattctaaagatgttataaaaaacaggaggaaagccttgaaaagagaattagttattgtcattgattttggcggtcagtacaatcagctggttgcaagacgtgtcagagaatgcaatgtatattgcgaaatctattcttacaagacagatcttgagaagattaaagcgatgaatccgaagggaatcatccttaccggcggaccaaacagctgctatgaggcagattcaccgacttaccagaaggaattatttgagcttggtattccggtacttggactttgctatggagcacagcttatgatgcatgtccttggaggaaaagttgagaaggcagatgtcagcgaatatggtaagacagagcttctcatcgataagaaagattccaggatcttcaaaaatgtatccgacaaaacaatctgttggatgagccatacagactatatttcccagactgcaccgggatttgagatcgctgcacatactgcagactgtccggtagcaactgcacagaatgaagagaagaaactgtatgcgatccagttccatccggaagtactgcacacagtagaaggaaagacaatgctttccaacttcgtacttggtgtctgtgaatgtgccggagactggaagatggatgcttttgttgagcacacgatcaaagagatccgtgagaaagtcggcgatggaaaagttctccttgctctttcaggcggtgtagattcctccgtagcagcaggacttctttccagagcaatcggcaagcagcttacctgcgtatttgtagatcatggccttcttcgtaaggatgaaggtgatgaggttgaaggtgtattcggaccgaatggtcagtttgacctgaactttatccgcgtgaatgcacagcagagatattacgacaagcttgctggtgttacagagcctgaagcgaagcgtaagatcatcggtgaggaatttatccgtatcttcgaggaagaagccaagaagatcggcgctgtagatttccttgcacagggaaccatttatccggacgttgtagagagcggtctcggcggagaatccgcagtgatcaaatcccaccacaacgtaggaggccttccggatttcgttgatttcaaagaaattattgagccgcttcgtgacctgttcaaagatgaggtccgtaaagctggccttgagcttggaattccggaaagactggtattccgtcagccattcccaggcccgggacttggaatccgtatcatcggtgaagtcaccgaggaaaaagtacgcatcgtacaggatgcagactacatttaccgtgaagaagtcgacaatgcagccgccgactacaaaaaagaacacggagaagatccgtcctggatgccgaaccagtactttgcagcccttacaaatatgcgaagcgtaggtgtaatgggagacttcagaacatacgattatgcagtggcgctccgcgccgttaagaccattgacttcatgactgcggagtctgctgagattccttatgcagtacttaataaggtgatgaaccgtattattaatgaagttaagggcgtaaaccgcgtattctatgatcttactagtaagccgcctggaacaattgagtttgagtagcttgaaaaatcgcggaaaagcccataaataaaggctttgcggggtgtcgaaaagaccaaatggagtgcaaatggagtttaaaaattatttttttctcttgtttatattccagattcacctgcaaatttcgtgaaatcggttattctcataaaataaaattagagtaaatatgaagaacagtttgttttgattgaagtgattttcgtcaaggcagactgtttttttgttgcctgcatttagaaaacagataccacagaaaggttctttactttcgatgagcttaaactccatgacacagtaatcacactgatggagaattaaaaaacaagaaaatttgataaatttcggaaaatgatgtccgattttgcatctgccagtacagagtatatgaagagataaatattcaaaacacaggaggtactgattatgcagaataaattatttttaaaggcagccgatatatgtgaacttctggaagtaaaacagacatcggcttatgaaatcatcggaaatctgaacaaggaactggaagaacagggctacctgacgcttagaggaaaagttccgacaaagtattttgtgaagcgtttctacggagtagaagatacttgtgagattccacaggaagagggaaaggaatggtttcatgcgtaagagaaaaatgtatttatcagtggaagacattgcagaactctttggattatcagtttcgtttgcttaccgggtagtggaaagaatgaatgccgatctggcaagcaagaactattatgtgattctcggtcgggtgccaacccgctatgtagaggacaagatctatggtctggaacatgttgagcagtatttgaaggaggataaagcggtatgagtatgatgcaggaaaaaatgtatatggatgtggatgatgtgtgtgcaattcttggagtttcaaaaacttatgcatatagtctgatgcgagaatacaacaaagaattgaaggcaaaaggctatattgtagtagctggaaaaatctctacgaaattcctggcagaaaagatttatggcatgaaagtcgaggattagcaatgggggtttacaaagaaggaaaaaactggaaagtacaggtctattacaaagactggcagggaaatcggaaaagaaaacagaaaagaggattcaggaccaagggtgaagctaaggaatgggaaagagatttcctgcaacagcagagccagggtgtggatattgaatttggaaattttctggagatttattacaaagatatggatgtccgtctcagagaaaacactatgtacacgaagcgatatattattgacctgaaaatcaagccttattttgaaaagaagattctcagtgaaattacggtggcagacgtccgtgcatggcagaatgagttgctgacgtataaggataagaatggaaaaggatattctcctacttatctgaaaacagtgaactgccagctgactgcaatcttcaattatgcaatgcggtattataacctgcaggataatccctgcaggaaggcaggagcgattggcaagagtaaaggagaaccgaaggacttctggatgcaggaagagttcaatgcttttctggaaacagtaagtgataagccggagacaagaatggcgtttcttttgttgtactggaccggaatgcgtatcggtgaattgcttgcacttacttataatgacatcaatcttgaagagaaaaccatatcaatcaataaatcttatcagagactgaaaggaaaggatatgatcacgcagccgaaaactccaaagagtatccgtgtgattacgatgccggattttcttgcagaggaatttagggagtattgcagtcatttgtatggaattatgaaaaaggaaagactttttcggtttaccaaatcgcatatggaacattgtatggctaccggaatcgagcggtctggtgtaaagcggatacgacttcatgatctccgccattcccatgccagtatgctggttgatatgggggtggctccattggagattgcagaacgccttggacatgaaaaggtggaaaccacgttgaacacttattcacatctgtatccgtctacacagagtaaattagcaggtttgctagataagaaacatgaggaagaggaggaataagcgatggctggtgacagacatggaaaacacaacacaacgaccatttcttttcgggtgaattcttatgaaaaagcaacaattgaagaacgagtgaaagtgagcggaatgaaaaaacaggattatatcgtccgatcatgcatttacaatcatgtatgtgttgttggaaagaaagaaacaattgagattatccggtcagaaatgaaggaaatgagtttggttttggaggatgtggcaaaagatttgaagtctgaaaaaccagttatttcagaaccggttcttgatagtatgacagaacggtatcttgcatttttggaagcagcattatggatgctgaaaggttcaagttatttatgggaggataaaaaggatggaagagaaagtaatgaaggattgtaaagtgctggcattgtgttcacaaaaaggcggggttggcaagacaacaagttgcgtgaatctggcagtcggacttgcaaaagcagggaagaaagtgcttgtgattgacaatgatccgcagggaagtatgacagcaagtcttgggtatcataacccagatgaattaccaatcacactggctactattctgacaaagattgtagaagatgaactatttgaaaatacactgggaattttacatcaccaggaaggaattgatttgattccggcaaacatcgaactctctggaatggaagtttcacttgtaaatattatgagcagggaacttgtcttaaaacaatatatagaaagaatgagagaagaatacgactatatattgattgactgtatgccatcacttggaatgctgacgatcaatgcacttgccagtgtcgatgcagttattatacctgtccaggcggcttatcttcctgtaaagggtctagaacagctgatacggacgataggaaaggtgcgaagacagcttaacaaacaactgaaaattggaggtatattgatcacaatggtggataaccgaacgaactatgcaagagatatatctgatctgatttttgatacatatggaaaccagattaagatttttccacagagtattccattttcagtacgagcagctgaaatcagtgcggaaggaatcagcatatttgagcatgatccaaaaggaaaagtagcggctgcatattggcagatgacacaggaggtgcttttggatgaaaggtagaagtgcatcgaagataaaactgacatcttatgatgaattacttggaggaggagaagaaacgaacgatatccagcaggtttcacttgagcatttacattctttcgagaaccatccatttcaagtaaatgatgatgaggcaatggcggaactggtggaaagtgtgaaagaagagggaattcttacagcattactggtacgaccgctgggtgatggtgaatatgaaatcatcgccggtcacagaaggagacatgcggcacaacttgctggtcttaaagaggttccggttattatcagaaatatggatcaagatacagctgtccgtgcgatggtagacagcaatctgcagagacctaatatactcccaagtgaaaaggcatttgcttaccgtatgaagatggaagcaatgaatcatcagggaacatcaggcggtatcagtgcgaaagacattggaaagaacgcaaatgacagtgcaaggcaggtgtatcgctatatccggcttacttatctgatgaatgacctattaaacgcagtagatcgtgatgtgatcggattgcaggtaggtgtagagctttcctaccttacggttccagaacaggagatggtggaggaagtgcatgagagtaccggaaaatatccaagtctggaacaggcaaaaaaaataaggcaacatcgagaagaaaaaacgctgacaaaagagattgtgcggctcctggttataggagagcgtaaaaagaaaacaacggtaacattaaaacaggatgaaattaagaagtattttcctccagagtatgatgaacagaagatacggactgttatatgtcagcttttggaggaatggagcaatcagaatcattgataagtacgaagggagggatgtgtcatgagtataagagcaacattccattattttcaaggaatggaatgcgatatgtacagtttttatcgtattcccaaactgctgtttacaagtgaatattttaaaaatctctcctgcgaagcaaaggtgctgtacggactgatgttagaccggatgtcactgtccatcaagaaccggtggtttgatgaagaggacagggcatatattttcttttcggtggaagagattatggaaatgcttaactgtggcaggaataaggctgtgaattgtctaaaagagctggatcaggaaaaagggattggattgattgagaagaggcgaatcggacttggaaaaacaaatgttatttacgtgaaaaatttcagcctgacagaatatccagatgagccagcaatctttgattcggaagaaacaccggaaaatgtagcagagagaaaagaaaatacagagacagaaatagaagaatatgcgaaaaaagagccggaaaagcccgtaaatacacagaagtttgaaaaacaaacttcaggaagtttgaaaaataaacttcaagaagtttcaaaaacaaacttcaaggagtttgaaaaacaaacttcaagaagtttagaaaacaaacttcaagaagtttcaaaaacaaactgtaataatactgaatataattatactgaatttagtgagaatgaatcttatcaatatctatctgaacaagagaaagggagagataggatacaggagagaaatgagtatcgacagttaattcatgataatatcgaatatgagatcctttgtcagagctatggaactggacgagtagaagagctggtagagctgatgctggatgcaatatgttcgacaaagacatatcaacagatcaatggggaagctgtgcctacacaagtggtcaagagccgtttgctcaaagtcgggtatgaacacatccagtatgtgtttttcagtcttgacaggagtacaagcaaagtgaagaatatccggcagtatatgctgacggtattgtataacgctcctgcaacaatcaatcagttttatgatgctgaagttcgacatgacatgtactgggggaaggatattccagacaggtaagaactttgtgcccactgggcacgaagtttaaaaagagatagtcatatctggcagatatgctaaaataaccttgtgtccactgggcacaaagtaggaggaagaattatgttgagatttatgataaaactgccatttcgaattattgcagctcctgtttggctggtacttgcagcggtgaatattgtgctggtgttcctggttgggttatctgctggattctgctatctgatagccggaatctctgttgtgacagaagttttgagtattgggtttggaatcagtacggactggacaatgaaatcagcgattattacgacagtagtgtttgttctactcccacatatcggtatggggatagttgcagtaattgaagttgtgaaatgtggattacaggaatttatttttggatgattgtggaaaatatagtggcgctatatggaaaggcagaaataaacaatggaagaattatataaagtgatggatgatttgcttgaggtggaatttcagatgaaagcagggatggatattctgaaagaactggaagagttttatatgctggaaaaagaaaccgaaaaatcggatgctagaaaagtagctgtgctgatgaaaggatatctgcagtcgatgaagtcaaatattcgagaaatcattcgttatattgatgacacgacacttgaaaaatcaaatgataaaaagaaagataaacaggaatctgcgagcaccatatccgaggaagtgcaggaatttgtgaatctgacaattacagagcatatggggaaagcatattcagaatggaagttaaagcaggataaagagccagtaagtgagattgataagaaataccagaaattactggaaacgttatcccaagaacaggaagaagtgattacggaatactgtaatgcaatttttagcagtggagcagaaacagaagaatttttctatcgactgggattaaaagatggactgaatctgaaaaatacggtaaaatctgtattagaaatgatatcatgaaatcggaagttggaggatacacgcatgaaaattgtaatcattaatggaagtgccagaaaaggaaacacgctgacagcaatcaatgcatttataaaaggagcatcagaaaagaatgaaattgaaatcattgaacctgacaaactcaacattgcaccatgcaagggatgtggtgtctgtcaatgctctaagggatgcgtcgataaggatgatacaaatcctacaattgataaaattgctgccgcagatatgattctttttgctacaccagtttattggtggggaatgtcagcacaattgaaacttatcattgataagtgctactgccgtggattgcagttaaaaaataaaaaagttggcacgattgttgtaggcggttctcccgtagacagtatccagtatgagctgattgataagcagtttgactgtatggcaaaatatctttcatgggatatgcttttcaaaaaatcatattatgcaacagccagagatgaacttgaaaaaaacaaggattccatgaacgaacttgaggggatcggaaaaaatttataaagcacgttccaaattcctgtttgcatatttcatcaaacggtacatattaaaattaacacaaagggagatgttagaatgaaagctcatgaatattggtctgtcggagcattgataacgatgctaggaactttttatagcggatataaaggttcaaaatcaagccataaatattttgcggcaagttctttgctttgtatgattatggctatttacacaggtcataagatgatatctaaaaacaagaaaacaaagaaagaaccaatatcattaggaaatgaagaataatacaatcaaccttgtgcccagtgggcacgaagttggcatagtcactatggtgtcaggagaaatcctggcatcttttttttatatctttttacacttcaaaaaataatttcaaaaaatttctaaaatcatgtccgattttgtcgctcccaatacagagtatatggaaggcaaattgaaaatcctctgatttccaaaaatcacaaacgtaaaagaggttcagacagttcttccgattgcaccttgacaattgaaggagctgatacatcttgaggaacatgcttaccggagataatccggctcgtgcaggcgaagactcctacgggaagagcgaagcaataatgataccaccgaagggtacaggacctctgctgaaacagagactgtgactgtatttttacagccgggttatctggaatgataacgatcagatgtatatgtacagacaaagcccaaatgtgaatacttagattttcttatttatattacaggagaaatcctgtagcaagtggggaatggttcgaatccattcctcattttttcgtgcagaaaatgcacagattattatcctgtttgaaataccagggaagggtgttgcaggaagaaagggaggacaaaaagaatgaatacgattgttttaatgggtagacttgccagagatccagaaactaagctgacatctacgcaaaagggacaaaccaaagtatctaggtttccactggtagtaaaaagaaatcgcacaagcaaagcatttgtagtgatgatcacagcttatggaaataatgcagaatttgtggagaaatatcttgaaaaaggaattaagattgctctttccggagagttggtaatctctcagatcaaagatgaacagactggaactgcatcctattataccgaagtcattatggataatgtagagtttgcagaagccaaaacaaaaaaagaagaatctgacggatttcaaccagcagagaagaggaagattccattcgatataccagaagaacttgaacaagaaatgccatttcgataggaggacaagatttatgagaaaatactttttagaattatttgcaataggattggttgattcagaaggaagaatcaatacagaacatatgacaagtgatgcgcttatgactgccatgaaaacaatggaagagctgacgcaaatgaaaatggatcgtttggttttggaaacaacaatggagatgatcttatgtatgtttgagtcatgtgacacagaggaatttacagaaatattaggcaagctgcttggcggaaagcagacttctaaagtgacagctcatttggaagcactggaggaattgttgacagaagaggaatatagtagtttccttgcagaatatcttggttatttaaccgtgaatgtagcagagtttattaggagcacaatcattgaaaatggtttgatgttacttgccggttcaggaggagaagaggatggagaagaggatggagaagacggattataaaatcacagagtttcacaattcggagtttggttccatccgtatgattgaagatggaggcagacttttattttctggaattgatgtagcatttgctttgggatatgcaaaaccaagaaatgcgataaatgttcattgcaagggggccctgaaacggggcgtccttacatcaggtggggtacagccaatgatttttattccagagggagatgtatatcggctgattacaaaaagtcgtttaaagtcagcacagaattttgagaagtgggtatttgatgaggtacttccggctattaggaaaacaggcggatatttagagaccgatcttttagacagggtaaaagataacccggaacttcttttggaatttgccgagagacttttggcagaaaacaatcgaaatcgagaattgcaaaatcgtgtaaaggatatgcagccaaaagcagattattatgatcatttcatgattacaggagaatgcaccaatattcgaacgacggcaaaagagattgaatttccagaaagaaaatttgtgaaacttcttttaaatagaggatttctatataggagtccatccggcacgctgttaccctatgcggtggagaagaacaatgatctgtttattgtaaaagactattttaacaatggacatcttggttcacagacattggttacaccaaaaggaaaagaattttttaaagcgttgtgtgcggaggaagagtaaagaatgaaggaggtggttgccatgattacagatctggacagcagttaaatcgctgaaaggagggaaaatcatgcaggaagaggtaactcagaaaacggtcacgttctgcattcggactaccaaagtaacagcagatttattgaaaaaggttcttgctgcttatctgcgtcatcagaagcagaaatcggtagagaagaaagcgaagaagaatcagccgaaacagggaaaggtcacggtaaaagagctggcaaaacaaaatgccgggatggtcaatatcgagatcacaaataagaatatcaagtcctttgaacgttatgccagaaaatacgggatcaattatgctttgaaaaaagataagagtaaagatccaccgatgtatctggtgttttttaaaggacgtgatcaggatgccctcaatgctgctttccgtgagttttcccagaaacagattcaaaaagcgaataagccttctattcacaagcgtcttgcaacttacagagcaatgatgccaaagaaatcgaaggacaaagtaaagaaccggcatcaggagcagagccgatgaaaaagcaaatcggtaaaaatctgatgcaaaaatggaagaataagatcagggtcaggctgtccgccctggataaaaagaaactggttcttaccaatatcccatatatcttaactgctttttatacaaatcgggcatcatttctttacagaaacagtctgggagaagatattgggaacaagctattatatgcgatggaacatgcagacaggattcttactggattgcagccaagttttaactggcgtgatatgctgacaggaattgtagcagctgtcattctgaaattactggtatggcagaaacagtcagatgcaaagaaactccggaaaggaatcgagtatggttcagccagatggggaaacgctgaggatattaaaccttatatgtcggaagatccctggatgaatattccattaacagcaacagaagcattgactatggaaagtagacctaaacagccaaagtatgcaagaaataaaaatatagtggtcattggcggcagtggttccggaaaaactcgatttttcgttaagccgtcagtcatgcagatgaactgttccatggtcattacagatccgaaaggcactctgatcgaggagtgcgggaagatgttagcaaagggaccacctaagaaagataagaatggaaatattatgaaagataaatcaggaaaagtggtacacgaaccatatgtgattaaggttctgaatactatcaacttttccaaatcgcttcattacaatccatttgcttatatacggtctgaaaaagatatcctgaagctggttacaacaattattgttaataccaaaggcgaaggggaaaaagcttccgaagatttttgggtgaaagcagagaagctgttgtacacggcattgattgcttttatctggtatgaaggagatgaagaggaaaagaatctgaatacccttctggatcttttgaatgaaagcgaaacccgtgaagaggatgaaacttaccagaatccagtggatatgatgttccaggaactggaagaaagagatccgcagcactttgcggtcagacagtataaaaaatacaaaatggcggctggcaaaacagccaaaagtattcttatttcctgtggtgcgaggctggcaccatttgatatagcagaacttcgtgagatcatgtcttatgatgaaatggaactggataagattggggacaggaagacagccttgtttttgattatgtccgatacagatacaacctttaactttgtgattgccatgttacagtcacagcttttcaatctgctttgtgacaaagcagatgatgaatatggtggaagactgccagttcatgtgcgtgtcattgctgatgagtttgccaatattggacaaattcctcagtttgacaagctgattgcaaccatccgaagcagggaaatctctgcttctattattttgcagtcacagagtcagctaaaggcaatgtataaggatagtgcagatactattctgggtaactgtgataccacactatttcttggaggaaaagagaaaactaccttaaaggaaatgagcgagcttctgggtaaggaaaccattgacctgtataacacttcggagacgaggagtaatcagaagtcttttggattgaattaccagaaaacaggtaaacagctgatgactgaagatgagattgcagtcatggatggaggaaaatgtatcctgcagatccgtggtgccagaccatttttctcggacaaatatgatatcacgaaacacaaaaactatcggcttcttgcagatgaaaacgagaagaaccggtacaaagttgagaaagagttaaatccgcagtatacaccgaaatctgaagaagaggtggaagtaattcatgtagaactgtcggagtaaccttgggaatgaacagaaaataatgaggaaaggaataactgacactaggtgcaccggctttttagtcggtgtattttcgttcccgtaaacacctgaaagaagtcagttttggtgaatgtatatggcattttttagcagtgcaattacaactttaaaaactcttgtagtcgcaatcggcgcaggtcttggcgtgtggggtgtcgtaaaccttctggaaggatatggaaacgacaatcccggtgctaagagccagggcatcaaacagctgatggctggtgccggaatcatgctgctgggaactaccctgattccacagctggcaacattgttctcttaagaggagtggtagatgaacaccatcattgagagaattacggaagcgataaaggatatcctgatcgggcttatcaagtcctgtttggataacatgttcacgtctgtcaatgagcaggtgggaaccatagccgggcaggtgggacagacaccgcagggatggaatgccggaatcttcaatctgatccagaacatttcccaaacggtgattgtccccattgcgggactgatcatcacatttgtcctgtgctatgaactgattacgatggtaacgcagaaaaacaatttccatgaatttgagacttacaacattttcctctggatctttaaggcgtatgtagccatttatctggtgacgaatacgttcaatatcacgatggcggtctttgacgttggccagcatgtggtcaacaatgccgccggagtaatttccggaaacacagcagtggacgcatcggaagcaatcacaaggattgtggatgcactggaagatatggaactgggggatttgttcttgttatccatggaaacgctgctgatcagtattaccatgcggattctgtcgatcattataaccgttattttatacggaagaatgatagagatttacctttatacttccatagcaccaattccgtttgccaccatgaccaataaggaatggggcaatatcggaaacaactatttaaaaggcttgttcgcactggcatttcagggattcttcatgatggtctgtgtgggaatttatgcagttttagtaaatgcaatgaccatatccagtgaccttcatgcagcaatgttttcagtagcggcttataccgtgattcttgcattttcattattcaagaccggaagccttagcaaatcaatattcaatgcccattagcgggcaggaaaggagcgcataccatggcgtatgtaccagtaccaaaagaccttaccaaggtcaaaacaaaagtagcgttaaatctgacaaaacggcagctgattttcttttcacttgccgcagtagtgggaattccgttttatctgttcatgagaaaaccaatcggttccagtatcgcagccatcctgatggtaacgatcatgcttccatttttcttcatggcaatgtatgaaaaagacgggcttccctttgaaaaagtggtggcaaatatcattcgacagaagtttatctgtccgtcagtaagaccatataagacagaaaatttttatcaggagatttccacccttgtaaaaaaggagggtgtgccggatggcaaaaaagacaaagcaggaggctcagcaggagcgtctgtccctggtggaaaaaagaaaccgtcaggaaagaagaaacaaaaaaagcagaaaagaaagagaacaggaaaagcgtaggaagaagcaggaacgggaccgcaggaaacagaaaaatattcctacaactgcgcagcagagtattccgtatattcggatgctgcaggatggtatttgccaggtgacaaagaactttttctccaagacgattcagttttatgacatcaactatcagcttgctttaaatgaggataagaccacgatatttgagaattactgtgatttcttaaattactttgattcttccatcagtgtgcagctgtcctttatcaatcagcaggtggatgtggcagaatttgagaaaagcattgacattcctgatcagaacgatgacttcaatgccattcgtgatgagtaccgtactatgttgaaaaatcagctttcaaaaggaaataatggtctggtgaagacaaagtatatcacttttggaatcgaagcagaaagcctgaaggtggcaagaccaaggcttgaaagaatcgaaacagatatcttaaacaactttaaggtcctgggagcacaggcacattcactaaatggtctggaaaggctggagattctatatcatgtgttcaaccaggatcggattgaaccatttaagttccagtataagatgctgccggaaaccggattaaagaccaaagattttattgcaccgacttactttaacttttccaagaatcagacatttatgatgggaagaacgatggggagtgtgagttacctgcagattcttgcaccggagctgacagaccggatgcttgcagacttcctggatgtggatgacagcatcaatgtcaacattcatatccagtccattgatcagagttcagcaatcaaaatgatcaagagcaagatttcagatctggataagatgaagattgaagagcagaaacgggcggtacgttccggttatgatatggacgtgcttccatcagaccttgtaacctatggagaagaggcgaagaacctgttggaagatctgcagtccagaaatgagagaatgttccttgtgacatttctggtaatgaataccgcaaagaagcgtcagaagctggataataatattttccaggtgcagggaattgcacagaaatataactgttctttaaaacaactggattatcagcaggaagcagcactcatgtcctgtattccactgggagtcaatcgaattgaaattcagagagggcttaccacatcttcaacagcgatcttcgtgccatttacgacacaggaactgtttcaggaaggggaagctctttattatggattaaatgcattatccaacaacatgatcatggttgatcggaaacgtctgaagaacccgaatggactgattcttggtacacctggttccggtaagtccttctcagcaaagagggaaattacaaactgcttcctgattacggaagacgatatcattgtctgtgatccagaagccgaatattcggcacttgtgcaggcactgcatgggcaggtagttcgggtttcgccagtatctgaccagtatatcaatccaatggatctgaacctgaactattccgaggaagataatccactgtcactgaaagcagattttattctgtctttgtgtgagctgattgttggaggaaagaatggactggagccggtagaaaagaccatcattgaccgctgtgtacggttagtatatcaggaatatcttgccgatccagtgccggagaagatgccaatcctggaggatttatataaccttctgagaaaacaggaagagccggaagcacagcgactggccacttcgttggaaatctatgttacaggttctctgaatgtatttaatcatcagacaaacgtggatatcaataaccgcattgtctgttttgatatcaaggagcttggtaagcagttgaaaaagatcgggatgcttgtaatccaggatcaggtctggaacagggtaacgatgaaccgttctgcccataagtccaccagatactatgtggatgagttccatcttctcttaaaagaggaacagactgcagcttatagtgtggagatctggaagcgattccgtaaatggggtggtattccaactggcatcactcagaatattaaggatttgctgtcttccagggaaatcgagaatatatttgaaaattcagattttatttatatgctgaaccaggcttccggagacaggcagattctggcaaaacagctgaatatctcaccaacccagctgtcctatgtaaccaacagtaatgagggtgaaggacttctgttttatggaaatgtcattatcccatttgtagacagattcccgaagaattccctctataaaatcatgacaacccgcttggaggagacttctgaagcaggttaaaacaaaggagaaaacaatgttacgagcaatttcatatgtattaacttttagtggcggtgctgtttttggcatcgcttttctctgtttattacaggcagggaaagggtatccgaagaaggaggagtaatcagtggcagaacagagaatgaaagtcagggacaagaaagtccagaagatgaccaaggatggtctggtggaagaaaacctgacagataaatcttctgttcgtgtcagtaaccgtgtcggtgatgtgcagatgggaagaaaacagggggaaaaagaagaaaaccttgtggataagtctccccgccagtctgaacggagtgggaaaaatattcgaccctctgtgcaaaaatccagagatgcaccggaactgatacggacagagaagcaaagtgaggattttggacagagtagtaaacagcaaaatagaaaaagaatccgtgctgaagtcggaaaagaatccagacttgcagaagaatccgaagccggacagtcagggagactgaaagaaaaacgtgctgatctatcagaaaacagaggagacagccggagaaatcagacaggtggcagcaaaaagccaaaacaaaaacaacgtttgaagtttgcttatgaggaaactggtgcttctgtgaaaaatgacaaagatatggagaaattgaaccagatggatacggatggagtcaatttccgccatcagaaacagaaagaaaaagccaaaaagttttcttatgaagaagcaagaaagaaaaaggaagcaaagcagcattccaagaaagcacaggtctatcaggcaaatgaaggagaaactcctggaaagaaaaaatcccgtttgaagtttggtgaaggggaatctgtgaaaacagaaaaaacttctgttgtcaagaaagcaggaagtgcaacttccgtagcattgcaccgtgagatcagcaaaaatgaagacgataatgcggcggtagaaggtgcccataagttagaagaaagcggcgaaggtgtttaccggctggaacagagaagtgccagacgcaggaaacagtgggcatccagaaaaagaagcagacttgaaagacaggaagagaaacaggcacaggctgcatcccatcaggagcagaagaagctgaaaaaacagattcagaagcaacagatcaaatgggattatgccaaagcgaagcgaagtgaacagacagtaggaacagctacaaaaggtacgattgattatattaagaagattggcggtaaggtcaccaacttctttaaagaaaatcggaaggtgtatatcagtgtagcagttctgatcggattgatgtttctgatcataacgaatgtcacgtcatgttctgcagtgtttttacaaaatgtaatcacttacacagggaccagttatctgtcatcggatcaggcaatccgggaagcggaattgtattatacacagctggaagctaatctgcaggagcggatcaacaacatggaatctgaagaaccgggacatgaggaataccgatataacatcggacctattgagcatgatccgtttatcctgatcagttatctgtcagcaaagtatgaagaatttacctttgaacaggtaaagccagaactggatgctctttttgcattgcagtatcggttagaaacagaagcagtcaatgagactgtgacagagacagcaactgtaagagttggagaatctttgggacaggttgtgaccagtgggtattgtaactgcccaatttgttgtggtatttggagcggaggaccgactgccagtggagcatatccaactgccaatcataccttagcggtagatgcttccaatccgtttgtaccaatgggaacaaaggtagttatgaatggtgtcgaatatactgtagaagataccggagctttcgcaagatacggtgtacagtttgatgtctattatgacagtcatgcggcagcatctgcacatggacatcaaacatgggaatgttatctggcagatgataatggaagcaatgaagtggaagtgaccaggacaagagatgtagatgtgctgaatgtcaccttaaatagtggaaacctgatgtcaatctgtcaggacaggttgggatttttccagaaagaactgttcagtgcctacaacgatacaaaaggcaacttgcagatgtttgcaacaccggttgattttaactggtattccagtgtgaccagctattatggatacaggattcatccaatatcaggagcaaatcagcttcataatggtatggatatcggagcaccggaagggacaaaagtaatggcagggctgaccggaacggttacaacttctgcttataacgacagctatggcaattatgttgtgatcaaggacagtaaaggctatgaactgcggtatgcacatttaagcagccggagtgtatctgcaggagcatccgtcacgaaaggtgatgagatagggcttgtaggaaatactggaaattctacaggaagccatcttcacattgaacttctgaaaaatggagagcggttaaacccgatcttttatctggaaacaggagaaggggcaggatttggcggcaatgaatataccagtgaagcagcacagcgtttgttaaatgaagcagcgagatatcttgggacaccgtatgtgtggggtggatattcgccaagtggatttgactgttctggattcgtaagttactgcctgacacattcaggtgtaaggaatacaggaagattaacggcacagggattgtatgacatttgtacgccggtatctcagtcagaagcacagccaggagatctgatcttctttacaggtacttacgatgcaggagttccggtaacgcatatcggaatctatgtgggcaatggtcagatgatccattgtgggcatccggtgcagtatacgtccatcaactctccatactggcagagtcatttctatggattcggacgatggtaaggaaaagggcggtgtaacagccgtccggaaaggagaagcgatgaaaagtcttgaaaaagcaacggcagattatgagaaagccaaggaaaaaatggaagcatccaaagccagatatgaagcagatttaaagcgtttcaaggctgcggagatagcaaaaacagaagcggaaaatctggaaattgtaaaaattatccgtgcaatggatatgagcattccagagctggaagctttcaaaaagagaatgaaaaatgaactgcccggcagggtagaaatacagaaggaggaaacaaggtctgatgatgaatttagagaagatgaaacagaagaaatctaaaaatagcgtgaaaaaaggattgcttgcggcaacaacgattctttgcttgacatcgcctatgttgcagacacagagtgtgttagcggcagagaatacagcacccgcaattacgattgaaaagccagatggctggagacagggggaaacggcagtcgcaattactgtggatgccagtcatatgccagaaggattttctatcacaaaaattgaagcgaaagctgggaaagacggaagctggcaggatgtgacagggaatggaagtatttccattactggtaatcagacggtctatgtgcgtgtgacagatggtgaggggaaggtctatgagcagaatcgctctattaagtgttatgacacagaaaagcctacgctttctgcatctctgacagatggtgtactgacgattcagggaaatgataccgtttccggcattacttctgtgacagttaatggcaccacttatacagatctgaaggatggaatgctgagagtgcaactgacacagaaagattttacaacaaaacagattgaaatcacggtaacggatggtgccggaaatacttctgaaaagtatgtgttgcagaatccttattatgaatgggcaaagaagcaggcagagaaacagaaaacttcaggtgacagcaatggtgcgatggcaaccacgaccagtgcagatgcaactgggactgagaaaacaacgacttcaccacttccgcaggatgcacaggcttctgagccaacagatgcaaaaggaactgtggatgatcggacagtgacaggtattgaggaacagcttaataaagaaggcgagacagcagattctgttaccaaaacagctacggaaggcacaaaagagttttataccatttcaactaagagtggtaagattttttatctgatcatcgacaattcaaaatctcaggataatgtgtatttccttaccgaagtcagtgagaaagacctgatgaacttcacactttctgattctgtgacacttccggaagtagatattgtttatgcagaaccagagaaacaggctgaagaagaaaagccggaaacgacagagacagatgagaaagataaggtagaggatgaaattcagatgccagaagacaaaagtttggcagggacttatctactgatcggattggttgctgttggagctgcggcaggtggttattacttgaaagtctacaaaccgaaacatgaatatgatgatgaagatgagatggaagaggatgaaaatgaatccgaagattcagagtcagaaaaacgggaagtagacgatgcagatgagcaggaagaacaggaaaatgcagggacagaagttttgaaagatgaagatttcaatgatgaggtactagaagatgaagaagaggagcaggagtaaatgaaattagtgattgcagaaaagccatcggttgcgatggcactggcttccgtgcttggagccagaacaagaaaagatggctacgtggagggaaacggttatatcgtttcctggtgcgtaggacatctagttggattatgtgatgcatcggaatacgatgaaaaatataaaaaatggagatatgatgatctgccgattgtgccagaatgttggaaacataaggtattggaaggtacgaaaaagcagtttggaatcttaaagaaacttatgagagattccaaagtagatgaagtgatctgtgccactgatgcaggacgtgaaggtgagctgatcttccgtctggtgtatgagcaggcaggatgtaaaaagccgatgaagcgactctggatctcttccatggaagaacaggcaattaaagatggatttgcgtcattaaaagacggttcgtgttatgacagtctctatcagtcagctctttgcagggcaaaggctgactggctggtgggaatcaatgcgagccgtcttttttctgttctgtataaccagaatctgaaagttggaagagtacagacaccaacacttgccatgatcgtggatcgaaatcagaagatcaaggaatttaccaaagagaaatattatatggctcatatcaaatttgacgatatggatgcggtcacagagaattttcagaaaaaagaagatgcagataaagtggctgcagagtgtcaggagcgcatgtgcgaagtggagaaggatgatgtgaaagagaaaacggtccgccctccgaagctttatgatctgaccaccctgcagagggaagctaacagaatgtttggctataccgcacagcagacattggatgctgtgcaggagatgtatgagcagaagcttgtcacttatccgagaacagacagccagtatctgacagatgagatgggagaaagtacagaaactctgattcagatgttatttgggaaaatgccttatgctgaaggtctggaatatcaaccggacgtgagtaaggtattaaattcaaagaaagtatccgatcaccatgcgattatcccaaccatggaagtagccaaagcagatattggtgaactgaaagaacgaagccgcaagattttgtatttgatcagtgccagggttctgacagcaactgcagatccttatatttatgagagtcataaatgtcagattacctgcaattatcatacgttttatctcaatgcaaagaaaacaaaacaggaagggttcaagacaattgagaaaaaactgaaacagttctttggaatcattgcagaaaaagaagagccggagttggatatctgggcaggcaagcattatggtccctgtgattcttttgtatcggagcattttacacagccaccgaaacagtacacagaagataccctgctttctgcgatggaacgtgcagggaatgaagagctgaccgaagatacagaaaagaaaggacttggtactcctgcaacaagggcagcaatcattgaaaaactgattcagtctggctttgtgaaaagggaaaagaaaaatctggtgccgacagatgatggaaatgtgctgattacggttctaccggatgagattaaatctccgaagatgaccgcagagtgggaaatggcattgaatcatattgcccagaatacagagacagcagatgaattcctaaatgggattacagagctgatgcaggaactggttgccaggtatcaggggatttcagaagagaagaaaaatcagtttcagggaaaggcaaaaggagaagtcattggcaaatgtccccgctgtggagcagatgtcagggaaggaaaagtaaatttttactgttctgaccggaaatgtgcttttaccttatggaaaaatgataaatttcttgcaagccagggaaaaaagatggataaggtggcagcaaagaagttcctgtctaaaggaaaaatccattataaggatctggtatcaagaaaaacagggagacagtatgaagcaactgtggagatggtcgatcccggagagggaaatgtacagttcaatcttatttttccacaacgataagtagtgtattgcaggcagtctaaggactgtctgttttaatacaaatatatgaaagagaggaccttagcatgaagaaaaaaggtaattttagaaaagtagtatctggcttgctggcaggcatgacaatgcttagtacagtgctgtctccgatgacggcatatgcagcggagatccagccagaggaaaaacctccactttatgaggaagtgaaagaccttctggatgaagatgaggtggtgactgccaaagattatgaaattgaaacaggcagtgtatttgatgtgaaatcagattacacgggactggaaatcaaggatgataacaaggtcaaagtcacatttgaggaagcaaagaatgacaaggatgaggattttacgacagatcatgcggacacttacaaagcggtctattatgtggaaccggtaaatcaagagcatccgaagtaccagatcagccgaaaactgattgtgcgtgagaaagcaacagaagctcagactgaaactgcagggagtgaagcagtgaccgaatcagaaaccgctggcagtgaacagcagacagaggaagcggaggattcagaagcagactcggagattaccgatattgacgctgatgaatttgatgatttagtagagcaggcacagaatcaggatacctatgatgaagaatcagggttagagcttcatgatgttttggaacaggcaggagacgaaggtgtggatcttgatgctatggaagagggagagattgcaacatttgaagcagtttcagcttattcagcaagaagtacacagcaggtaacaattgaaaaaggaccactgtatagatatgcagattataatcttggaacctatctgacagagccgtactatatcagctacggaaacgtcagagcaattgcgtattgtgtacagccagctaagccaggacctggatctggaaattatacaattacaaagattggagacaatcaggcgttagcaaaagtgtgttattacggcacagatgccgcagggagcgaaagcttttttgcgaataaacacacggatttttcagaaggaaaaagattcatcatcattcacatggctgcatcatatgccaacggaagcagtgatgcattttacggaaccaatgctacaggagaggctttggcaaaagaactctataattattgtgtgaataagccggaaataccagatgtagcgatgtcattttcaaagccggatgtaaaagcttatgtagatagaaatgttcagagaacggagaacattaagttcaacgcatcttcccagcagaaaatcacaatggacttaccaaaaggagtaaagctccataatgtatctactggaaccgtaagtgcggcaggtgcaagcgtaacaattggaggaggaaccacgttttatctctcagctcctctgacacagacaagagatgtaagtgatactttttctgcaaaaatgaagggaagtattacaaaagattattcagcatataaattgactacgaatgcaagtgttcaggatctggcatttgtatttggagaaggtgttgctgatgaaaaatatgtaagcttaaaggtgtcatggattgaacaggctacgatcgaaatcgtaaagaaagacgatacagcgaatgtcaatcttgcaggtgcagtatttggcgtttacagcgatgaggcttgtacaaagctgatcactcagatgcctgcaacagataagaatggaaaatcctctgttacgattatcaagacacaggataccgtttatctgaaagaaatcacagcaccacagggatatgtagtaaatgcaacggcaacaaatgtaaaactggtagcaagtaagacctcagctgtaaccgtggaaaataaggagcagcttgcagagcttactgtttataaagaaggtcaggtgcttaccggagcagaagtcagtgagagtggaaccgtattccattatgagaaccgcagacaaaaaaatgctgtttacaacgtgtatgccggagcagatattgtgactgcgtatggtacaaaagtgtacagcaaaggtgatctggtgaaagaaaatctgacaacaggtgagaatggctctgttaccctgaagaatctccatctaggaacttatgtggtaaaagaagcaaaagcaccggacaacttctataatggcggcgaagaaaagacagtgacgctgacttatgccggacagaataaagaagttgtatttgcggatgtcaccttcaacaatgagcgtcagaaagcagaagtcactgtagtaaaacaggataaagatacaaagaaaccgctggaaggtggtattttcgccctgtatgcggcagacgatatcaaaaatgcagatggtgtagttgttgtaaagaaaggcaccctgattgagaaagccactaccggtgaggatggaaaggcaaaattcacagcagatctgcctatcaatcattcctattccgtaaaagaagaccaggcaccagaaggctatgtaagaaatacagaagacgtgtatacgttcaagttctcttacaccaatgataaagaagcaaccgtatctttcgcccataccttcagcaatgaccgtgtgacagcaaaaatcaatttattcaaagttgataaagaaacaggaaaagccgttccgcagggcgatgcaacactgaaaggtgcagtctacggattatatgcccgtgaagatatcgtgcatccggatggagcaaccggtgtgatttataaagcaggggaacaggtggcttctcttacaacggatgaaaaaggacaggcttctgtagatggcttatatcttggcaaatattacgtcaaggagatcacaccaccgaccggatacctggcagatacagaagaacatgatcttgaatgtagttatgaaggtgatatgactgcagaagtaaaaagagaatgcatttccagtgaacaggtgatcaagcagccgttccagattatcaaagcagccaacaatggaaagaccgatgcagatctgttatccggagccggatttacagtttatctgaaatcttcccttacaaagaaagcagatggaagctatgattttgattctgctaaaccagtagtgagtggagaaaacggagctactgagatttttacagatgaaaaaggttatgcctgcagtattccattaccatttggaagctatattgtccgtgaaacaacaacaccacacaattacaagccagtcgatgattttgaagtgaatatcacagagaaccatccgaatgagccacagatctggcgtgtgcttctggacaaagagttcaaggcaaaattgaaaattgtgaaaaaagacgatgaaacaaagaaatccgtcctgattgcaggaacagaatttaaggtatatgacctggataacaaaaaatacgtggagcaggtaactacttatcctgtgacaaccacacacaagtcctattttacagacagtcagggttatctgatcatgccaaagaacctgaaaatcggacattaccggattgaggaagtcaacgcaccggaagggtacacaatcaacaagaattatatggagattgctgttgatgcaaacactgcttatcagatggattcagaaagcggcgatgccattatcacagttgattacgagaatcatccggtaaaaggaaagctgacgatctataaaaaaggtgagatgctgagtggattcaaaaaggattttgtttatgaagaaaaatatctgaaaggtgcagagtttaacgtctatgcagcggaaaatatctacacaccggattatcagaaagatgaaaatggaaacagacagctgatttatgcaaaagatgctctggtaacaacggtaacgaccggggaagacggaaaagcagttgcagataacctgccgcttggttcttactatgtggtagaaaaaacagcaccggaaggatttgttctgaaccatgacagatcggatgtagcatttgtctatgcagatcaggatacacctgtgatcgaacaggaagtgactgttggtgatgacagacagaaagttgcaatccaggtagaaaaacaggatgcagaaaacggagcaacggtagaaggtgcagtctttggcatttataacaaagatgatatcaaagcagaaggcaaagtcattgtcaacgctgataccctgttacaggaaatgacttctgataaagatggaattgcttcctgtacgctggatctgccactcggacagtattatgtaaaagagttaaaggcaccggcaggattcgtttcttccgatgaagttctgaatctggatgcttcttatcagggacaggacgtgaagacagtaaaactgaaaacagtgaagaagaatcagccgacaacggttgaaattacaaaatcagatgtgacaacaggtgtggaactggatggagcaaaactcaccgttcttgatagagaggggaatgtcgtagatcagtggacttctgtaaaagaccagccacatgtgattaaacgactgaccgttggggaggaatatacccttcgtgaagaaatcgcaccgtatggatatctgaaagcaacggatgtgaagttcacactggaagataccgcagagattcagaaggtagagatgaaagatgaagtgccgacaggacttttaatcatcaacaaaaatggagaatttttggataaagtgacacttctggacaatgtaaaaggcactgtggagcatctcttcgaatatgtaaccggaagccttacagatgtgactttcgatgtatttgctgcggaagatatcaaagcggcagatggtgtcagcaaagattattacaaagcagatgaaaaagtaggaactattactacagattccaatggtattgcacagatggataatctcccggcaggcaaatactatgtgaaagaagttaaaactgcccatggctatgtattggatggagaaccgagatatgttgatctttcctaccgtgatcaggacacaccggtaatcacttatgatgaaaaatggcagaatacccgtcagaaagtaaaggttactgttctgaagaaagaaaaagatacagaccgtgttcttgcaggcggcgtcttcggcctttataccagtgaagatatcaaaaatgtaaacggagatgtgttgcttgagaaagattccctcatcgagcagaaagcaaccgatgagaaaggacagatcacttttgcggcagatcttccagtagatggaaaatattatgtaaaagagaacagtgcaccggacggatttgtgacaacggaagaagtgcaggagtttacctttgaatatgccggagaagatcaggcagaagtaagctatgattttacgtttgaaaatcagccgaccacagtggaactgacaaaaacagacctgaccacaggcaaagaacttccaggtgcacacctgaaagtgacggatgcagatggaaatgttgtggatgaatggacttctacagaaggatctcatgtgatcaaagaacttgttgtaggtaatgagtataccatgacggaaacaaaaccggcagacggatatgttactgcagagagcattacctttacggttgagaatacagctgagattcagaagcatgagatgaaagatgatgtgaccaaggttcagatcagcaagacagatatcacaggagatacagagattcctggtgcaaaactaacgattcttgataaggacgatcaggtagtagagagctggacttccacagaggaggcacactatattgaaaaactgccaattggtagatacaccttacgagaggaacaggcaccaaaaggatatcttctgacatcggatgtgacatttgaggtgaaggatactggagaaatccagaaagtggttatgaaagatgatactgccaagggaaaagtcattctcaataagacagataaatcatctggggaaccgctgaaaggagtagaatttgaattccgtgacagcaaaggaaaggtcctggaaaccttaaaaacagatgctgccggtcatgccgagagtaagctgtatgagattgccgcattcaagaacggcaaatatgatacagcaatcaagtattatctggtggagacaaaaacactggatggatacacactggatcagaccaagcatgaagtgacatttgcctacgcagacgacagtacgccggttgtagaagttactttcaatctgacaaatgagaaaccggaagttccggaaacaccaagcacaccagatgtgccgcagtcccatgaagagacgaaggtatcagatgcaccgaagacaggagataacacaaatatctggctgccgattctgcttctgcttatctctaccggaggcatggcaggactttatatcagcagaaagaaaatcagaaaacagtaatcctcagtaaagggggccctgaatcagggctccctttaaaatacaaaaattcacagaaagggacagaaaaatatgatgaaaacaatggaaaagagacaggaagcaagaaagaaccaggagagaactttaaaaagaatgatggcttatcagaaaaaagccgagcagatggtcagcaggaaaagaatgaaccatcacatgatcagaaaggggtaaaagcgtatgatgaacagaaaagaattttatgaatatgtcaaagataatgtaaaagactatttgccggattcatatcagaatggagaaatccgtattgaagaagttgcaaaaaataatggattaaggttgactggcatttcaattccacagggtgatcaaagagctgtgccgatggtatatctggattctctttatatggaatatgtcaatggaaaaaatctggattcctgtgtgggtgatgtggcagatatgcgtattgaagtgcaggacaaagcggcatttatcaatatgggtcttccggatattttggattatgaaaaaatgaaggacaaattacaggtgagaatctgtgaccgggaatggaatgaagaacgcctggctgataaagttgttaccgaacatggagattttgcagcatattacgcagtgaatgtggaagaaaacgagggaggaattggtagtattccggttactgtcaatcttatgaatgaatggggtgtgacagcagaacaaatccaggcagatgcagtggcggcagacagaaatcgtggtgttgttttgatggacatgaatgaaatgataaaatccatgatttttggtgaagaagcagaaaatcttttgaatgaaaaactgaatgttgaagcaatggaaaatccaatgttctgtctttcaaatgcacaaaaaatgaatggtgcatcactgttactgcaggaagatattcgtaagcagatcggtgaatgcctgggaagtgattattttgttcttccctcttcaattcatgaggtgctgattcttcctgataacggaatgtttgaagtaccggaattaaatgccatggtacaggaagtcaatgagacgcaggtagagaggcaggaacagctttcggataaggttcagttctgtgatggaaagacagcagttatggaaaatgccgaacgcagggaagcacgtctggagaaagaaaaagcagcagaaaaagcaactgggaggacagaagcaaaaggtggaatccatggaaaactggagaaagccaaggcggagatcaaagcaaaagggacagatacaatcccaaagaatagggcgaaagaccttgcctcagtattataacgagaaataacgatgattttgaggggactgtgtgagcagtccctaattttatgaagatggaggagaaaagaatatggactggtgtttatatggtgatgataaaagaaaggaaatggatagagatttaaaaccggaatatcttttggatgacttacggagatatcaggatgtatttggtgaagaatttggtgtaaaagagcttcttatgctggaggatatccgggtaaaggctatgattgccggagcacttgcagatatgccggaatttcttattgatcagattggaaaagcaagtaacagtagtaattttccttctatgacaagggcaatggaacggattgccgatgttgtagaagaaaagtgggaagaagaaagggagtaacagatggcaaataaattatatgcaatggaacttctgacggaggaagtggcaaaggatgttgctgccaatccgcaggaatggatgcggtttctaaatactgcatccaggctgtaccggtacacttttccggaacagctcttgatctatgcacagcgtccgggagcaacagccgtggcatccatggaaatctggaaccagaagatgtaccgatggattaaaaagggttctaaaggaattgccctgatagataacacatccggaccaaaaacgaaactccgatatgtttttgatgtgcaggatacttataaggtaaaaaatctgggcagagatccgcagttatggaatcttaatccagaaggagaacaactggtggcagattatctgcaggagcggctggcactggaagcaacagagggaggattagcagaggttcttcaccaggcggcagaagaaagtgtgcaggcctggttgccggatgctttcgacgaactgcaaatggatgtagccggcacttttctggaagatctggatgaacagaatcagaaagtggagttccgggaactgatgacaaacagtgtctggtatgtgttactgaaccgatgcggactggatgtgcaggaatatcttgatgcagaggattttcgtcatattacagattttaaccagttaaaggttattggacaccttggaagttctgtgaatgagatcagcagaccggtattgatgcagattggacgatatgtgttgaatgacttggaaaaagatctgaaaacggttgcaaaagaaaaagaagtagcttataatgaatttaacacgttaattcgtaaaagcaaaacaaggaacacagaagatagaggagaaaataaggaggaaacagagcatgagagagatcacttacagccagaatggagagtaccagattccggatatcagtctggaggagacgagaggaacgatcgggaagtacggattgatgaggaaagagtatctgagaaaccacaaagtagccagattcaacattctgaccttacagaaccgtctggacagtcatctgatggaaatcgacagccaggcaaggcagagagtagacaacctgatgtcagaacttctggagaaaaacccggcaccggacaaaatggcagacgggatggcatggaccagacacatgaaccagatcaaagcacaggcagaggaactggtaattcaggagattatttacaattaagtctgttcccgacagaagaggaacagttaggagaaataaggaaagcggtagctgcattagaacagccagccgcttttcttatttctgatgaagtagtagatgatattctccgcacgggaagtggacagaaaaatacactgtttcatattacggcaagactgattgaaggtctggataatgaagaaatgcagaacttcctgaaggaggaatatgaaacaggtggaaaaggatttaccatagatggacagaaaatcagtatctggtatgacaatgatggtatccgtatccgacggggagattccgccagaagaaactttgatcgcatggttacgtgggaagaagcggcggacagaatccgggatatgtatgaggatagaagttacgtggataatctgatttccaataacgccattgaacaggagcaggaagaaatgaccaatcttcttgcactccattttcgggataccagcagaaaccgggaggagcagcaatcatattcggattggcaggatgtcgtgcgggaagcttggacagattcagcggaagcagatgcaattgcccatcgctttgaatggctgcagaaagatatggatgagaatccagaagattatcgcaggtgggagattcagcataatccggaatatttccagcgttttcaggatctccagagggagcgttcctgggtagaccagaaatttacggtcgaacgtccggccctttcctttatcacacaggatgagatagatgcagtccttagaagaggcgggatcactgccggaggacggaatcggatctatgagtatttcatggaacatcacgatataaaggatgcagctgagtttctgaaaaatgagtatggtacaggtggagcagcacctgggataccgggagcgtatgaatccgatgcttcccatgatgcgaaaggattaaaacttgcgaaagggaagattggcagtccagatgtagaagttctattaaagtggaataaggttgcagaacgtgtccgtcagctgattcgcaccgatgatttcttatcaccggaagaactggaaaagtatgaagaacggcaggaagcacagagacaggcggatctggaaggagctcagcaggctttggaagtggagcaggaaggctctgatcagcaggaaatacgagaggaaaatcaggaaccgtcggaggttgagacacaaccggaagcagtagaagatgcagaaaaaaaggaagatataacaccagaacagtctgatattccagcaacaaacttccatatcacagatgatgaactgggacagggaacaccaaaggaaaagttccgtgctaatatcatggcaatccagcttttaaagaaatgcgaggaagaaaaccgcaatgccacaccagacgaacaggagattttatcccgatatgtaggctggggaggtcttgctgatgctttcgatgaaacaaaatccgcatgggagacggaatatctggaattaaagacagtccttacaccggaagaatatgcagcagccagagcttctaccttaaatgcccattacacacagccaatcgtgattgaaagtatgtatcaggcgttggaaaatctgggatttacaaaaggaaatatcctggagccatccatgggtgttggtaacttctttggaatgcttcctgagaagctgaaccagtcaaaactctatggtgtggaactggacagtatcagcggtagaattgcaaaactgctttacccagatgccaatatccagattaaaggttttgagaagacagattatccgaatgatttcttcgatgtggcaatcggaaatgtgccatttggagcttataaagtgaatgacaggcaatatgaccgctataattttatgattcacgattattttctggcaaagacaatcgaccagttgcgtccgggtggtgtggcagctttgatcacaacaaaaggaaccatggataaagcatcaccggaagtccgaaagtatctggcagaacgtgccgatctccttggagccatccgcctgccgaacacagcattcaaagcaaatgcaggaacggaagtcagtgcagatattttattcttccagaagcgtgacagcatgacaaaagagatgccggagtgggtgaatcttggaagtgatgccaatggaattacggtcaatcagtattttgcagaccatccggaaatgattctgggtgagatgaaagaggtatccggtccgtatggtatggaaacaacctgtatgccgatagaaggtgctgatcttgaagtccagcttgcagaagctgtcaggaatattcatggaaatatggcacctgcagttgatgtggatgcagaactggatgatgtaccagagagtatcccggcagatccgaatgttcgtaattacagttatgcggttgtagatgatcaggtatattaccgtgttaactctctgatgaatcaggtaaagatgcctgccgctactgcagaacgtgtaaaaggtatggtggagatccgagacacggtgcgtgaactgattgccatgcagatggaagaatccgtaacagatgaagaaattcacaaacagcaggagaaattgaatcaagtatatgatgcttacacagcaaagtatggagtcatcggaagtaatgcaaacaagcgggcgttttctgatgacgcttcttattgtctgttgtgttctctggaagacctgaacgaagatggaacattgaagcgaaaagcagacatgtttacgaaacgaaccatcaaaaaggcagtggcggtaaccagtgtggaaactgcgacagaagccttagcattatcattgaatgaaagagcaaaggtggatctgtcctatatggcacagctgacaggaaagacagaagaaaaaatcacggaggaactggttggagttatatttaagaacccactgacagaccagtgggagagtggagatgagtatttatctggaaatgtcagggagaagttaaacacagcaagaacctttgcagagaatcacccggaattcacaccgaatgtccgtgcattggaagcagttcagccaagagaactggaagcatctgaaatcgaagtaaggattggggcaacctggattgaaccatcggattatcaggactttatgagggaactgcttcatactccgtggtatcttgcacagaaggagatacaggtaaaatattctgaggtgaatggtgagtggcggattaccgggaaaaatgcagacagtccaagaaatgcgtttgcctatgcaacgtatggaaccgagagggcaaatgcttaccggattctggaagatacactgaatctgaaagatgttcgtatctatgataagagtgtcaatgaaaatggggatgagattcgtgtcctcaataaaaaagaaactatgctggcatcacagaaacaggatgccatgaaagcagcatttaaggattggattttcaaagatcaacagagacgtgaaagactggtaagagtttataatgaacggtttaacagtatccgtccccgtgaatacgatggcagtcatctgactttcccaggaatgaacccggaaattgaacttcgcccacatcagaaaaatgctgtcgcacatcagctttacggggataatgtgcttctggctcatgtagtaggagctgggaagacctacgagatggtagcggctgcaatggagagcaaacgtctgggattatcacaaaagaatctatttgtcgtgccgaaccatctgacagagcagtggggagccgagttcctgcagttatatccgggagccaatatcctggtggcaaccaagaaagattttgaaccggcgaaccggaaaaagttctgtgccagaatcgctatgggaaactatgatgcgattatcatcggtcattcccagtttgagcgtatcccaatctctgatgagaggcaggaagccatgctgcggaagcagattgacgatctggaaatcgcaatccagagtgcaagatatgagcaggatggcggccgctatacggtaaagcagattgaaaagaccagaaaaacgctgatgacaagactggagaagctgaatcagaaagagaaaaaggataatgtagttacctttgaagaactgggagtggatcatctgtatgtagacgaggcacacagttataaaaatgcgttcctttatacaaaaatgagaaatgtagccggaattgcccagaacgaagcacagaaatcagcagatatgtttaataaatgtcagtatctggatgagattaccggtggaaaaggcattacctttgcaacgggcacaccgatcagcaacagcatgacggaactttatgtcatgcagagatatctgcagaacagcaaattacagaatatgggcttgggattatttgattcctgggcatccacgtttggagaggttgtgaccagcattgaacttgcaccggaaggaaccggataccgagcaaaatccagattcgccagattctataatatcccggaactgatgaatatgttcaaggagattgcagatatcaagacttcggatcagttgaatcttccagtaccggaagcggaatacgaaactgtagtattgaaaccaacagaacagcagaaagaaatcgtagcaagcctaggagagcgtgcggaagtggtaagaaacggtggcgtagatgctagtgtagacaatatgctgaaaattaccaatgacggaagaaaactggcactggatcagcgattggtcaatgaactattgccagacgatccgggcagtaaagtgtcggtctgtgcagaaaaaagctatgaaatctggaaagatacagttgtacagaaatcggcgcagatcattttttgtgacttgagcacaccgaaaggcgatggcagtttcaatgtttacgatgacttgaaacagaagctgatggcgaaaggtgtaccggaaaaagaaattgcattcattcatgatgcaaataccgaagcaaagaagacggagctgtttggaaaagtaaaatctgggcaggttcgttttttgattggttcaacagcaaagatgggtgccggtaccaacgtgcaggatcgtctgattgctctgcatcatctggatattggctggaaaccgtctgatctggagcagagggaaggacgtatcatccggcagggaaatcacaataaaaaggttcatatctttcggtatgtgacagaatccaccttcgacagctacatgtggcagttgatcgaaaataaacagaagttcatctcccagattatgacgagcaaagcaccggtcagaagctgcgaagatgtggacgaagcggcactgtcctatgcagaggttaaggcactggcaactggaaatccggcagtaaaagaaaagatggcactggacgtggatgtggcaaaactgaaacttttaaaagccaatcacatgaataaccagtaccgtctggaagatgatattgcaagaaattttccacagcagattgcaaaattgaccgagactattgatagctacaaagcggatattgcccattatcaggagcataaaatcacagatccagaacagttttccatggagatcagcggcaaagtatttacagaaaagaaagaagcaggagcggcactactggcagtctgcaaggacatgaaagcagtcgatgcagcaatggatatcggaaactatcagggattcaacatgagaatccagttcgacagctggagtaaggagtttatcctgtctgtgaagcatgaatcggtatcgaaagttcatctgggagcagatgccctgggaaatatcacccgtatcaataatcttttggaaagctatccggagaaactggcagaagcggagcaacgattggaaacggtacaggagcagcttacaaatgccaaagaggaagttggaaagccattcacaaaagaagaggaactgaaccagaaactggagcgactgtcagaactaaatgcccttcttaatatggatgaacgggaagacacagaagcagagcagtcagaatcgaaagagaaagaagaacgaccggcacgtggttctatccatgagaaattgcagatttataaagaaaaaagccagcgggaaagcgagaatggcagggaagatagaaaaagggacttcggtctggaataagaaaacaggaaagatggcataatttggtagaaagaatgttctgccggttatgccacttttgggaatacaggaggaacttatatggcgagaaacatgataacaggaatagaaacgcagaaaatgcaggaatatacacaggaacaaatagaccgtgcagaacacatgggaatagcaattccagcggacgtaaaagaacagatttttgaatatgcaaatctggttggcgaagaagagaaagtaaggacgctggtaagaaatctggcagatgcagtcaatcggtcagatgaagatagagtagaggaacttctggatgatgcccaaatggatattcaggacttaccagatccaaccataggcaagctggaacttcgggattatggatatacagcagaggatatggtgccgcttagaaaagcagcagccctggattatcacagaatgggttctaaaatctattgcctgggtagtgatggcagcaagggagagtatgcaagtaaagaaatgatacaggcacatgaagggctgtttggcatggaatcacagatgtgggaacggataagggatcaggatctggattatgcagatgaagattttggagcatttcaggagccgatgaatgtgattggacaggaagaagctctgaaattatatgatgccggagcagatatctatctgattaccaatttttcatcaccaatctatgttacagagcgaatggagattgaacgaggtccggagcattatcagatgtctacagaagaactggaacgattccgcaatttggaatgggagatgcagaaatatccgcagattcagtctttgaaagaggcaaatctgctattagggacaagacgaacattcggtatttatcaaataagagatggtttgccaggtgaaaactatgcgtttatgaatatgagcttcattgaaagtcacgggatgcagattaaaaaagaagactatgaactggtctatgtgggagaattatttggaaatatgtcgctagatgatatatttgaacgattcaacatcgacagaccagaagactttcgaggacattccctgtctgtcagtgatatcgtagttctgaatgaggggggaaaggtaaccgctcattttgtagacagtatcagttttgaacagctagattctttcctgaatctggaagaacaggttcttagtgaactggcatatgaggtaggagaacgttactttgctattcagagaacagaaggaggatatgattattccttttacgatgaagatttccgcctgatggatggtggcgtctatgaaaatggtgaaatttctattgaagaagcggcagaggaacttttggaagacgaaggatggactggagaacgcatccgtggggattatgatcagttgatggaaaaggtagaagaaatggatgaggttgtaatggcagagattcagaaaagccagggcgaatataagccattggcaaaggtagaagaactggaagaggcaaattataacatgattgataatgtcctcaataatatgccaccgaagaaagaaccgtatctggaatactttgccgcagaatgtgatgagttccatgatatgggagcttatgaaaaaagtaccgatgttaatcagattgctgcggtttatgaaaaatatagggagaatcctgagaatgcctatcgagtatgcagtatggggattatctatcgtgatccggaagacagttactatgatgatgctgaatttgcaatcgtaaaaggaaatacagtacttggaaatctgatggacgatgttcgattttatggagaacttgcactgatacgggaagggattgagaaaattcatgatgcattgccggactataagtatgtaccaatgcgggatgttcgggaagcaatgtatccagagaagatgaccacagaacagttggcagaggcattggatgagattgcagaagcttttgatccgtatgagtatcgagataatgtggagacgggagaaaatacggtacaagaggtgatgttggatttgcagagtggcaatacacattcttatatttcttatctgaaggatattgtagacgaagaatgtgaccagtctgtgcgtgcaggtgtattgattgaaagactgaaagtctatgagccggagtttccaaagaatctggaaccaatggtgtatgtaaactattgtgaagaaagtgctctcatgaatccaagatgtcagaagttatccgagctggatgcaaaaacagcagaaatggataaagaatggtatgcaaaacgtgattcgaagacagaggaacctacaaaaatcacaaagatatatgtgactgtatattatgcggaaaaaggtgaacagatgctgcatcatttcaagaagtcaatagatattggaaatggacatggcggtattgtgagtcagttgaagtatgataatgaaatgaagcttacagatgagtattggatcaattaccagaaaggtaaaggaagtgaagagttccaaaaatatatggaagatctgacagacatgcagaatcatgtgcttccgtatctgcagagcttttgcaatctggaagaaaaaggtgtgaaagagagacgagaacagcagataacggaaagaaatgaaggaagagcagatgagcggggaacaagtaccgaagcgaatgcagtggtcaaggatgcaggaaaagcagataggaaacaggtacaacagaagcaggcggtagttggaaaagataagaaattatccattcatgaacggcttgagattaataagaggattattcaagaaaagcagggaaaagataagccggagagaggggctgatcggggtgtgagataagtataatattataattctaatgaaggatgtagggagtcaatccctgcatccttttttaatgcgtaaatatggattgaacgttataatgaaagcagattggagatgtttttcttctaaccacatcaattaggaaaagagtatctgtagcagataaattcaaaaggtttgtgaataaattaaaaaagatattcaatatttgaaaaaagatatgtgatatttgtaaatgcgaattgtacaaggagttttttgtgtgataaaataattttgatattgattgcacattaaacggaggaaaagaggatggcaattagttataatggattatggaaacagttaattgaccacggaatgaaaaaaggagatttgtgtgccaagactggtcttagctccagtacaatagcaaagatgacaaactgcgagtcggtgaaactatctgttttggaaaaaatctgcaaagagttggattgtaactttggagatttgattgactatgtaccagataacaaagaaaagtaaattaccttatggaggaaaatgtaaatggctacgagaagtgcaaaaatagatcagaaagcagacctaatatgggcaatagcagataagcttaccggtgtatataaaccacatgaatatggagatgttatattaccacttacagtaatcagacgttttgactgtattctctcagatacgaaggatgcggtattacagaaatacgatgaagtaaagaatcttccaatgaaagatattttacttcgtaaggcttcaaaaaaggatttttacaatacaagtaaatatacatttgaaagacttatggatgatcctgaccacattgaggagaattttagagagtatctgaataaattttcagcaaatgtgcgggatattctggaaaaatttaagtttgatggacacatcacaacgatggcaaataaggggattctgtatattgttttaaaggaatatacaacagacagaggaaatcttcatccgaatgaaatctctaaccttgaaatgggatatatttttgaagaaattataagaagattctctgagtctcataatgaagatgcaggacagcattacactccaagagaagttatccaacttatggttaatattctcttctatgatgataatgacatcctttctggcaataatgtggcaaagacgatttatgatcctgcctgtggaaccggaggtatgctttctgtagcagaggaatatttacatagtctgaatgcatctacagagcttgtatcgttcggtcaggaaatcaatgaccagacatttgcaatctgtaaggctgatatgctgattaagggtaacaatgctgattacattaaggatggcaacacattatcggatgaccagtttgcaggcagtacatttgactatatcctttcaaatcctccgtttggacgtgagtggaagaatgaaaaggcaaaagtagaggaagaggcaaagcttggcttcggaggaagatttggagcaggacttccggctacaagtgacggacagatgctttttcttatgacagcaatatcaaagatgaaagatattgataaaggtggaagcagaattgcaatcattcataatggttccccactttttacaggagatgcaggaagcggaccttctgaaatcagaagatatattcttgaaaatgatctgcttgaggcaatcattgctttaccgaatgatattttctataacacaggaattgcaacctatatctgggtattgtcaaataaaaaggcaggtacagtcagagaaggaaaagtgcagctgatcaatgccaatgagatgttcgtgaagagaagaaaggcattaggaaataagcgaaatgatatctctaaggaagatattgcagagattacaaagatatatggtgattttaaagagagtgaaatcagccagatttatgatgacgaggattttggttataccaagattacagtagaaagaccgcttcgtgatgaagaaggcaatctggtattgaaaaagggaaagaaacagccggataccagtcttcgtgatacagaaaatgttccgttaaaagaggatatcaaagagtactttgaaagagaagtacttccatttgcaccggatgcatgggtagatgagaaaaagtcaaaggtgggatatgagattccgtttacgagatatttctataagtatgaagctccaagaccatcagcagaaattatggcagagattatggatttagagacagaactatctggaagtcttgaggaggtatttgacctatgagagagatgaaggatagtggagtggaatggattgggaagataccaaaagattgggagattgttcccttaacaaagcaattagattcaattgtcgattataggggaaaaacaccagaaaaaacagaagaaggaacttttttagtaactgcaaagaatataaaagatgggaaaatatgctatgagttatcaaaagaatacgttcgtgaagccgattatgaggagataatgcatcgaggaataccacaaattggcgatatactatttactacagaggctccattggggcaagtggctaatgtagatagaactgatattgccttagcacaacgtattataaaatttagagcattaagtactgttaataactattatttgaagtattggatgttgaacgagggattccagcagtttttacattcattatctactggttcaacagcaactggaataaaatcaagcaagttatttttacttccgttggttagaccaaatatagaacaacaaaataaaatagttgaatatctggatgccaagtgttcaaagattgatgaaattgtagaaaagcagaaggtgataattgaaaaattagaggaatacaaattatcaattattacggaagcagtaaccagtggaataaatccagatgtagagatgaaggatagcggaagtgtatggtttggaaatattcctataaattgggaaatgaaaagattaaagtatgtattccatattcagaaagatattgcaggagaagaaggacatactgttttgtcaattacacaaagaggaataattcctaaagatttttctaacaatgaaggacagtttgcaaatagctatgcaaattatcagttagtccataaaggtgatttcgcaatgaatcatatggatttgctgaccggttgggtagatatttcaaagtacgaaggagttacaagtcctgattatagggtttttgtattaaatgataagaatggtatgtgtccaaagtattatttgtatatgatgcaaatgtgttatagtgcacgaattttttatggattaggacaaggtgtaagtggtatgggaagatggagactacaagcagataagtttttgaatttttatattcctattccaccatatgatgagcagaagaaaatagctgattacataactgataaggtaaatcatattgaagttgagattgataaaagaaataaacttattaagaaatatcaagaatacaaaaaatccctcatttacgaagttgtcacaggcaaaaaggaggtgtagctcatgtctgattttgatgtaaaagagaaacgatttgaggaagatatcgaagactatctgactcatcatggtggatataccaaaggtgatccaaagaaatttaatcgtgaatcaggacttgaagaagatacttttgttgagtttattaagacaagtcagcctaagaaatgggaaagatatgtaaaaatttatgcggagaattccgagaaacagatcatcgaacgttttaaaagagaagtaaagacaacgaatcttttgaatgtgatgcggcatggatttatggacagaggaatcaagttttatccgattttctggaagccggagacctctttgaatgagactacacagatgcagtatgatgcgaatatccttcattgtaccagacagcttcattattctgtacataatgaaaacagcattgatattgttctttttgcaaacggcattccggtggtatctatggaattgaaatgtcagtttacaggacaggatacaacaaatgcgattaatcagtataagtttgatcgtgccggtaaggatgcgatttttgcctttaaggaaagggtattggtacatttcgctgtagaccttaccaatgtttatatgactacaagacttgagggcgcacacacttatttcctgccatttaatcagggaagtaatggcgccggaaaagtaggtggcaaaggtaatccggtaaatccaaatggatatgatacagcttatctttgggaaagagtactctgcaaagacagtctgatggaaattttacagaaatatatgcacttgcagcaggagtacgataaaaatggaaatcttgtgaaagagactatgattttcccaaggtatcatcagcttgatgttgttacaaagctgttggaagatgtaaaaaagaatggttcaggtaagagttatctgatccagcatagtgcaggctcaggaaagtccaattcgattgcatggctggcacacagacttaccggactccatgattatgaagacaataagattttccagtcagtaatcatcgttactgacagacgagtgttggacagtcagttacagtctacagtatatcagtttgaccatgtggaaggtgtggttaagaaagtagataaaaattcgggacagcttagagatgcaatcaatgatggtgtaggcattattattactacattacagaaattcccggtaatctataaagaagtggattctgcaaaaaaaagatttgcgattattattgatgaggcacattcttcgcagaccggagatgcagcgaaaaagttaaaaagagcattagctgatactgaagaaattctgaaagagtatgccgagatggaagatgaggacgagagaaaccgcaaggatgatgaggacaagctattagacgaactggcagcacaggggatgcataagaacttatcattctttgcatttacagcaacgccaaaaggaaaaacattgcagctgtttggtcagaaggatgcggaaggaatctacagacctttccatatttattctatgagacaggcaatagaggagcatttcatcttggatgttttgcagaactatatgacctacaaaatgtactataagattgccaagattattgaggataatccggaatttgatacaacagctggttcaaaggcaattataaattatgagacactgcatccacataatatctctcagaagactgccattatgctggaacattttatgaatgtcacaagacataagataggtggcagagcgaaggctatggttgttacaccatccagacttcatgcagtacgatatgtgcaggaatttaagagacagataaaagaaaaaggactgaatgaccttgaagtgttagtcgctttttccggtgaagtgaaagataacgatgatgtgtttaccgaagagggaatgaacaaggataaagaaggcaagacaataaaagaaaaggctttgccggaaacattccatgcagatgattatggaatccttgttgttgcagaaaaatatcagacaggctttgatgaaccactacttcacaccatgtttgtggataagaaattgtccggtgtaaaggcagtacagactttatcaagactgaatcgtactacaagaggaaaagtagatacctttgtacttgattttgtgaattcagcagaggatatcaaagcatcttttgagccattctatgaggaaactgtgctcttggaggaaacagatcctaatgttgtatatgatatgaagaataccttggatgatttcagggtatatcagaaatcagaagtggataaatttgcggatattttctatcagaatgagaatcaatcagctggtgatcttggaaagcttcagggacagttaagaccagcaatagacagatatgaagtgcttgaggttgaaaaacaggatatatttaagtctaccttggcaagttttaaccgtgtgtatgcctatattacacaggtatgcagattatttgacaaggatattcatagattcagtatttattcaaaattcttatacacaatgcttcctaagggacatggtggagagaagataaatattgatgacaaagttcttcttgaatactataagctggaaaaagactttgaaggtccgatagagcttgaaagcacagaaggcggatatacacctatctccggtgattccggtcatagagagcctaagaaagacccgttgacagtaatcattgataagataaacgaaaagtatggcactcattttacagagatggataaagttcttgttcagatggaaaatgattatgccaatcaggagaaatggcagagctacgcaaagaacaatgacagggcaacatttatgctgttatttgaaaaggattttccgaatatggcagcagacagatatgagcagaatgaccagtttttcagaaaactgtttgatgatcctgatatgatgaggcaggtaatggagactgtaggttctgtattgtatgagagattgaagaagaaatatatctttgatccaaagtcgggagtaattgaagaggcgacaccggagacttatgtggaagatacatatttgacgaagaaataaggaagtgaaaacatgcagttaggatggatagatttttcaaaagaagaccggcagaaggcattcgatgtgattaaccttctgagtgaacagggagcagtcgatgaacttggaatcggcgttattcgtgatgcttttgccaattatttctttccggggacatctaccatccagactagagcaaagtacttccttattgttccatatatgttaagggaggctgttgatggcaggtatggaaaggatgcaaatagagttttaagagctatagattctgctgaaaaagattgtggcatcagattgttagaagcagatcccaaggcagaaggtgttattggaagtcgtgtattgccaaagggctgggtggcaagaaaaccatcagatatctactggaatggaattcgtacctttggaatattctgtgattatggtctgtctataccggagtatgtttcattggcggtaaagctaaaagaacagaagtctgtcagccggttgggaaacaggaatgatgatgcagaggaaaatgataaggatgattcggatgcaggagacatcggcaatattagattctggaatcttccgatttatcatgatgattggagagacaaccttacaatagagctgacgcaggaggaagcattctatctggataagcagattcagaagtcaacgaaagggtctcttttggaatatgtattgaaaaatcgtattgatttgaatgaatatgatgattttgcttctttaacggctgaactatcggaaaaagtaggtgaaaagctggcatatatgatgaagcttgcctgcgattttaataatctggtgtatatggcgagagtaagatacaatgtcatgctttcagaagacgagaatacatacgcaaatgatgaatggagcaggttgcttccggatataaggcataatgcgacagtagatctggatgcagtgtttggagaattccagttgatcaatccaagggcaaagagctttctatgtgggatacaagcagcatttattacattagatattgatatggctgatgaactgattcgcaagagggaacggagcctgaaaggagcagccagagcgaagttaagcagaacaaaggaatttgatcattcaaaatgggtaggcggtggaatgctcgattacagattctcgaatgccagaagaattgtgaatgacatctatgccggggaggtgagtgctgatgtttagaccggattcaaaccgagatagaacggattacagcggtattttgatgcctccggacggatatagattggacagagcagtaggcactacatattcacttgacctggaagcactcacagctgtggcgatatgtcttggattatctgaagaaacagatagtaagcttatgcaaaatccaattggtatctcttttaattcttgcttttcttccggatacagatcaccggtgctgtttacttttttggcaatctgattaatattcacaccgatcttatgcatttcctcatactgtttcttcagtggagtggtatcggtgttgacgatgtaaccgtcgattgccattttacgaagataagctcccatattttttgtctttgattcaatcatctttctacgaataagctttttttcttctggggaaacacaaaacaaaatctgtatatttctttttctctttgccataggcagattctcctttctttggttcttcgaagtagtgacttctgtgtttttaatttagggcagggttccctaaattgctggttttccggaagtgtatatacacttcctgtccttgctatttaccggtggcacagccgccggaagagagtcttaaaaaagaaccctctataaataaggtactgagagaagaaaaagaggacatcgaagctcagaagtatgacgcaagcatgattctgtggtatagtaaaatctgaatgaaaaagaagaaaagaggtcaaaccgatgtcacggaaaaaccataagatgatagatgggagattactgcaaacgaataagaagtattcccagttaaaaatgaagcagaaagaaaagattgcggaatggatgtttcaggcaaccagagattattatatgaaaaaatgtacttttccgagtgacaaacatctggaagaagtggtggattctgtttatgaaaaaattgaagatgcagaaatctggattccgtatggagaggtcttcaagcattataaatccaaacgatcggatatcaacaaacgtgtcagaaaatctctgaatgaaaaagaagagagtcagattgagaaggtctgttttatgaatatgtgtatgattcaggatcataaagggaatgtactggctctggataaagtaaatgatagctataccggtacaacttttccaggcggtcacgtagaagcaaatgagatttttcagaaatctatgattcgggaagtctgggaagaaacaggacttacggttgaagcaccgaagcttggaggattatatcattggcataagagcggagtgcactatgttattaccttgtataaagcggataagtttaccggagaattaaagagttctgaggaaggaagagtttattggattccgctggaagagttaaaaacaaaagaacttgctacaggtatggaacacgttttgcggattctggaatcagagaaggtggacgagtgctatatgcatctggaagcagatggatatgtgggagacttgtattaaagaattacatgagaaatggctgcctgctcattggagaaaagacagccattctttataagatacatcattcatctattctgttttttgcggttcgtttttggaagtgaaattaatatatttggcacgttgtaaaattgaaataactgcatcaatgctttcaggattggagaagctcatgataaaaggttcttctttaaattccatgggttcgaacccaggattctgatctggattcttgagtatatggatgggacgtgcactctgattataaaatgccagttgtgcggaatctgtagtgttaccgatgacaccaatgcctacatccccttttccaaagtctattctatgtttatttaagttgatcattttcaaaaatctcctttttcaaaaatagcatatttagtaattttctattattcccgaagtagggatatcttttaaaaagtcactgttggaagtaatcggagaatctacaatctgaacgccgcttcgtttcatcattcggaatttgaaatcaagaagttccggtggaactttcagttctgcggcagcctggaaaaaggacatatcggcgttaagcatctccagtacatcttcatcttccagaagataatcagcggcaaagcaattcgcttcatattcacattgtgatactccatcgaataattcaaaatcatgaaaacacttgatctgaagggttttctgatgaaggagtgcgtgaccgatctcgtggatcaggataatctgctgtatgatttccggcaggtcgcagttaatgacgatgcaggtctttcgacattcccgcatacagaagcctttgcaacagtttggatcagttccaagcggaagcttcttaacaataatatgcatagcggctgcaaggcggtacggatcactttcctgatattttgtttttactttactaacagtgtctcttatacattttgaactcataaaaacacctcgatatttcataagatagtttgctgcaagtatagagtagcaaaagtgctgtacgaaaatacggacacctatgaatccctttccgtttcagtgtttttctttttccgtccaaatgtctttttagcttccatcttacaggaaagatatgctttggttacagcctgatagaaagcatcttttgcttcttcatcgagttcgccaccagcaaaaagagcacggttggcttcgagaatctcattgatgtccctggcacctttttcaccaagctgtccattgacttcatcaatataatccattttttcaattccataagaaggatctgtgatctcatcatgttttaaataatcataagagacatttaatgcatgagcgagctttctcatagtagagattcgtgcgattgtgccggaactttcataagctgcgattgcacgctgggatacgccgaccagttctgcaagttctttctgtgtcagatgattttgttctcgttgaaatttaatcttgtctgaaaaattcatagtgggatcctttccaagtttttgaaatcgtaacttcatcaacttcataaaaactattgacagagttcattatcacgtatagaatacaaacaaacgttcgtgaagttagtagaaattataattcaaaaacttcacaaagtcaatatgaagcaaagaagttttattacgatttttagactggtaggtgaatgttatgagcaggacaattcttcattcagatatgaattgcttttacgcaagtgttgagatgctgcatcatccggaacttgccggaaagccgatggcagttgggggcgatccggaagcaagacatggaattgtgctgactgcgaattatattgcaaagcgagccggagtaaaaacaggtatggcattgtggcaggcaaggcaggtttgcccggaaataatttttgtaccgcctcgcatggatctttatttgaggttttccagaatggcacaggagatttacagtgaatacacagatcagagagaaccatttgggattgatgaaagctggctggatgtgaccgccagtacttctatcaagggagatggaatgaagattgcaaaagagatcagcagtcggattaaatatgaactgggtgttaccgtaagtattggtgtttcctggaataagatatttgcaaagctcggttctgattataaaaagccggatgccattacagagttttccaaagacaattacaaggatattgcatggaaacttccagtaggagatttactcatggttggaagaagcactgaacggacgatgaagaaacttggcatttgtacgattggcgatctggcaggggcagaaccttctatattagaaacatatcttggaaagatgggattggtacttcatacctttgcaaatggatgggataagactccagtttcagtagaaggatatagagcaccaatcaaatctatcgggaacagcacaacaacaccaagagatcttgttagtgaattggatgtgaagattattttgatggcgctttcagaaagtgtaggagccaggttgcgtgaaaatggttttcaatgcaggacagtagaaatctcgattcgggataatggactgtaccatttcacgagacagtgcaagttggacagggcaagtaatcttacagaagaaattgccagaactgcatttgagttatttcagaaaaattataactgggaacatccgattcgtagtcttggtgttcgaggatgtgatctggtgtctgaagagatgccttatcagcttgatttatttatggatgaaacaaaaagagaaaaaatcaaaaagatggaccaggtggcagatgagatccgtggaagatttggttatcagagtattcagagagcatttatgtatcaggataagatactggcacagctgaatgctaaggaacacacggttcatccacaagcatattttcatggataggagagagcaggtgttttgtaatgacagctaaagtgtatgtagatgtcctggcggtattcagccgggaaggagaattgatccctacagcgtttgtctgggaagatggacgtaagtatgcgattgataaggtttcaaaaccggagcgttgtgccagtcgaaaagctggcggaaccggatatcgttatacctgtcaggtgggcgggaaaatctgtcatctgacttatgaagaaaattataaatggtttatggaacgtaaataacggtgccctaaaagggagccctgaatcagggccccctttggagagatagatattcgatgagaacatcagcagtcggggatacatcctttcccgtgagaaccgattgctttcaatagatcatacagttgccggtcagccagaaatagaagctatcccacagcagatatttctgcggaatctgcatgaagagatgttaggacagtgacagactgtgaatggaataaacaatacaatgattggtctggctgcggaagcggtcgggaaggaggacaattatgcagagaatacaggatatgtttatcaatatggaagaagtggcagaggatgcttataagaatacggaattattgttgagtcagtataccaaggtaatgttccgtattgagaagaatcttgtggatatagattatgaaatgtatgcagaagaagggaagcatctgaaggaaatgttatatgatctggtagatttcgatgcgactgcagagaaacgcagaatccaggaaaagcttctaaataatgatatgaatctctgtttgctggaaatcatgagagattccctgatagctttgagggattatccgaagaatggacagctgtattatcggcttttgaaatatagatattttgaagcaggaaataccaatgaagatgtgatgctgatgctggatgatatgccaagtaccacttattatcgaaaccgtaagaaagcaatccgtttgtatgcaacaatgctctgggcatttacacgtccggaaaagatacagaataagatggaggaaataaactggaagaaaagtgggagtaaagtggcagtgaactgacagtaaactggcatgtgaatggcattacaatgaaaatacatgcatgttagaattgatatgctgagagaaatagaccttcgcagacgtaatgtttgcggaggtttttcttttctcaaattttaaggcgtcaggctgtgcccggaagggcatggcctttttttatacccaaaaaacaggttgcagatttgaaaaagcttcctttttaacaggtagatgccggaaaggaagagcatatcaagatgcagggaagaggcagacattatgccagatatccatgatttccgatttgtcacaaatcaacaaaaacgacaaatcggaggaacaatcatggaagaaagaaaatacacattttacgacagatatcagaaggtgaaatacgctaatattacagcagaagagctggaagttcttaatatttcttataataaggaacattatatgttcgatcagcagcatcagagaaataatacagtattattttgtggattagaatcagaaaacagttgtgcgacagactttatcgcagatgatggacgtgacattgcatcagatatcacaacagagatcttcttcaaagaactcttcagtgatctgacagagaaggaaaagaaaatcgtgagcgattattttattatgggaaaacaagttaaggaaacagcagcggaactgggcatcagcacacgtcaggtgagtagagacaagaacagtgctttggcaaaaatgttaaagagaatgaaagcagctggatatgaatcatatgctgaggcggcaggtgcatttctgcaggaaagcgattatattccaacacagatggagacgcagaattctattatgaagaaaaggaccggagaagtgagactgccatcagatcataagatgaaaaaataaattcttaaaaaacaaatcatgataataatgtgatgatatcacagaaaacaaataaaattcagattataataaagccataaaagaaaaaacgaggaggactgtaaaatgtctgctattaatatcaataaaaataattttcagaatgaaataatggattccgagaaaaccgttcttttagacttttgggctccttggtgtgctccttgccgcatggtagtacctattgtagaggagattgcaagtgagcgtagagatattaaagttggaaagattaatgtagatgaagagcctgaactggcaaataagttcagtattatgagcattccgactttagtggttatgaagaatgggaagattgtacagcaggtttcaggggcgagacctaagaatgcgattttagaaatgctttaaggaggtgcgctaatgggcttttttgatttctttaaacaggcgaatattaatcaaggaatagaggaatataaaaggactgccggtgcagttctgctggatgtacgtactccgcaggaatatcaggaagggcatataccagaaagtaaaaatgtgccgttacaacaacttaacaatattgtttcagtagtgaagaatacagaaataccgctgtttgtatactgttattccggagcccgaagtcgtcaagcaactgggatgttgcaacgaatgggatattctaaagtaaataatattggtggcattgctgcttattcaggaaaggtggaaaaataagatgaaggtaataatcgtaggcggtgtagccggaggagctacagctgcagcaagaatacgaagattggatgaacatgcagaaattactgtgtttgaaagatctggatacatatcctatgcgaattgtgggcttccatattatattggagacgtgatcacagacccggaagaacttacactacagacaccagagagtttttttaaacgcttccgtattaacatgaaaattcatcatgaagttatttccatacatccggaacgtaaaacggtttcagtgaaaaatttagagaatgatgagatatttgaagaaaactatgataagctgatcctctctccgggggcaaagccaacacagccaagacttcccggagtaggtattgataaactttttacacttcgtactgtagaagacacttttcggataaaggaatatataaataagaatcatccaaaatcggctgtattggcaggtggcggttttattggtctggaactggcagaaaatttgagggagcttggcatggatgttacgattgtccagcggcctaagcagctgatgaacccttttgacccggatatggcatccatgatccataatgaaatgagaaagtatgggataaaactggtactgggctatacagtagaaggatttaaagaaaaagacaacggagtggaggttctgttgaaagataatccatcccttcaggctgatatggtggtgctggcaatcggagttacaccagacacagcattagcaaaagaagctggtctggaacttggcatcaagggaagtattgtagtgaatgacagaatggaaacttctgtaccggatatttatgcagcaggtgatgccgttcaggtaaaacattatgttacgggtgatgatgcgctgatctctttggccggaccagccaataaacagggaaggatcattgctgataatatttgcggcggtgatagccgttatctgggcagtcagggaagctccgttatcaaagtatttgatataacagcagccactacaggtatcaatgaaacaaatgctaaaaagtcaggattagaggtagatacagtaattctttctcctatgagtcatgccggttactatccaggtggaaaagtgatgaccatgaaggtggtttttgaaaaggatacgtatcgcttgcttggtgctcagattataggatatgaaggcgttgataaacgtatcgatgtgcttgcaacagcaatccatgcagggctgaaggcaactcagctgaaagatctggatcttgcatatgcaccgccatactcctctgccaaggatcctgtaaatatggcaggattcatgatagacaatatagcaaaaggtaccttaaaacaatggcatctggaagatatggataagatttctaaagataaaagtgttgtattgctggatgtgagaactgtaggtgaatttaacagggggcatatggatggattcaaaaatattcctgtagatgaactgagggaacgcatcaatgaaattgagaaaggaaagcctgtttatctgatatgccagagtgggctgcgaagttatattgccagtcgtattctggaaggaaatggatatgaaacatacaacttctccggcggattccgcttctatgatgtagtggttaatgaccgtgtactgatcgaaaggtcatatgtatgtggtatggattattagaaataaacaaaatattttacgattttcacgtagtataaaaggattcccccatttattagaatgactttcataattctgataaatggaggattctttagatgttatagaaaaacaggtttatgatctttgtagtgtttccagttttttcgaatcaaggatggtgattttgccgcgtgagagtttgacgagaccttcgccttgaaagtatcgaagcattcgagtgataacttccctgtgggaaccaagatggttggcgatagtttcgtgagtaatttttaattcatttgtttcttcgatagaggtctcttctaaaagaaatgaagcaactcgcttatccaaactcttccacatgatctgttcaatcagccacatgacatcagaaaaacgggtagccattaactcattggtatagtttgcgacgggagccgattccttcatgatgtccttatagatttcagcagggatgatccaaagatcagtatctttttctgcttcaatggttacttcaaattgaatggactgcatgatacatgaggcggataaaagacacatatccatatcgaacaaacggtaaagtgtaatttcccgtccttcatctgaaagtatgtaagttcgaagctgcccggatttaaccagtaataatccagtacaatccaggtttccgttgtgaatgatcgttcctttttttacatcccgtgtaatcaaattgtctgaaattacttttttctgtactgtatttaagtcattccatagtggaaaataattttcgaagctcataacagttatctcctttacgaacatagtatacttacttttttaagatgcgtcaattacataattgacatatgccataaataaaaatatactgactatagtacatgactgttgtgaatatgagggagggataaataatgcagggagatgtcagttttacatttttggaccgaatcgaagaagtagaactgaatattgtagatagacgatggcagtctgcactggcattggcattgactttgccagatatttgcggaggtattgctttcccggaaattgttaaacattatcgagatggccgggttatgctggatcggaaaaagaatccgacccgtgatgtgggaacccagtatattcgctggtttgatgaatatgcaggggactactttaaactatctcaattcgatgaaaagccatatatttgcggagaacgctgttggcagcttcgatgtgaatatcttcatcaaaataaaggatttttgaatgatgaaaataatatacgctttcatcttggactaaactgtggaatgtcagtttgtcagttggacagtatgaacatacaggagaacggaaacgatattcgtatagacatagaacagttttgtctgaggatgtgcaaggcagcaaagagttattatgataaagttcatttggaaaaagactttagtctctataatacaccagttttggattttattcaggtaacacaaaaaaagaaagctgcttctattattgcgctggtctgtggcagtgaacgttatgcaaaaggattaaaagaagcattgcagtttatttcagagcagatcatgctgttttatacaccggaaagcgctaaaacaaaattagacagacataagccggatctttggattgttaccgaagatatgacgagccaaccgaatcagccatggcgtgcggacaggacaacacctgtaattttaatcacaggcaatcctgatgctgttgaaattaaaaagaattcaggaaaactaactgttctttctatgccattatcaatagttgatttgcggaaaaccgtcgaaatatatgtgtcgtgaggagaagtttatgctgtacataatactattatttgtaattgtatatttgatgatgcttatgcggagacagaaagaaaagatgagtgaaattaaaatacaaatagatcaactgcaagcacaacatgatcgattgcagaaagaaagggatcagttacaagaacggatgaatcatctggaagagcaacgagaacacttgcaaatgcaaacagaccaggcatttcggagtgctgatgaaatcgagaaaatttgcgatgagatatggcatcatgctaataccattcacctttactcttcgttagctgaagaagaaagcaaatctataacaatgaaagaaaaacaaaaagaaattattcgaacaactgaggaaattctaaacatcatatataaatataaaggtaatgtataataaaaatatgtcattgtaatgattagcgttcaaggtaaattcttatgtaataatatcacagaaggatttacctttttcaggtacaatagagatacaaaatttgaaaggggaacaaagcattggcaaaaagagtggcaagtgtcgataaaaaaagatgtgttgcctgcggagtatgtgaaaatacttgtccgctggcagcggccaaggtttaccatggatgttatgctgtggtagaagaaacagtgtgtgtaggatgtggaaaatgtgcaaagtcctgtccggcaggttgtattgaaatgaaagagaggacagcgatgtgaagaaaaagaaacattggtatgattatttatggatatgggcaatcctttattttgctctcggtttttttagtattttgttcgcttggtttgggatgattgatttcctgttgccgttaggaatagcaatattcggtggaaataaatttttctgtaatcatttgtgtggacgtggccagctttttagtaagcttggtggagatttaaaatgctcaagaaataaaccaaccccgcgatggatgagttcaaaatggttccgatacggctttttgatatttttccttacaatgtttggaaatatggtatttcagacatatttagttggtgccggagcatcatccttgcgtgaaatcatcaaattattctggaccttccgtgttccgtggggatggacatacactgccggaacagtagctgattgggtggcacagtttagttttggactttatagtttgatgcttacatctttgttgttagggttgatcgtaatggtgttatataagccacgaacctggtgtacattttgtccaatgggaacaatgacgcagggtatctgtaaattaaaaaataatgaaaagaagtaatactataaggcgatttataaaaggcatatgtcaaaaacattattgacatatgccttttataggactattatataagaaaagcgagaaaggagcagtttatgccgagaccagtaaaatgcagaaaagtctgtcatttccccaatgttttagaatttcttccggcagacgatactgacaaaaaaacacccattgttctgacggtagatgagtacgagacaatccgtcttttggacaagaaaggttatagtcaggagcagtgtgcagtatctatgcagattgcaagaacaacagttcaacggatttacgagattgctaggaagaaaatagcagatgcactcattgatgggcatccgcttagaatcgagggcggggatttcagaatttgtgacggtcagagtagcgactgcagctttggaggatgttacaaacaggaaatttacaaaaaatatgcagcagaaaaaggagaaggtatcatgagaatagcagtaacatatgaaaatggacagattttccagcactttggacacacagagacatttaagatttacgatgtagaggaaggaaaagtagtacattcagaagtagtagatacgaatggaagcggacatggtgcgttggcaggagttcttaatgccttaaatgccgatgtcttgatctgcggcggaatcggaggaggtgcccagaccgcattagcggcagcaggcattaagctttttggcggagtttccggatatgcggatgaagcagtagaagcttttatcaatgaaacacttgagtataatccggatgtgaaatgttctcatcacgagcacaaccacggggaaggacatacatgtggcgagcatggatgtggaagccacagttgtcattaagaagtgagactgccatcagatcataagatgaaaaaataaaaggtattgatctataaagagggaacctgcatcatcaaatttgcttgagatgtcgggttctcttttcgtttgcataatgatatacttttattgtgattaaaaaagcacgtacaaaactcataggagaaagatgtatacttatgacaacatttggtgataaaattagaaagttgcgaaaagagaaaaaaatgactcaacaaaagctgggtgctatggtcggcgtttcttatagaacaattcgagcttgggaaattgatggacgatatccaaagcagagtagtttatatcaaaaactggcagatgcatttcagtgtcaggtttcttatcttatgaatgataatgaaaccgtgtgcttgggtaatgatgagccaagtgaatattctggtgctaaacaggcaaggcagattcttgaacaggcagctgctttatttgccagtggaactatgaccaatgaggacaaaactattttcatggatgagataacgagactttatctggaataaaaaaagaacagaagaaaatggtaagaaaaaatgaactgttttgttttcttgcttgctagaaaagaagaatagaacgtataatagtgttaatgatccagagatatttactctggaaatagaattacttgtaccggtggtgcgagtatagattaggagtgaaagaatggtagaagaaactatgttttccggggagtcgaaaaatattgagtacaaggtatccttacccgataaaagtgaaaaatacatgaagacgattgtagcttttgccaatacacaaggcggcaagctgattgttggagtagatgataaaacacaccagattgttggtgtggaaaatgatgtgttgtttcagctgatggacggaattgccaatgcagtttctgattcctgtgtgccacagattattcctgatattgagccgcagacagtagacgggaaaacggtcattgttgtatcagtagaagctggaaagaacagaccgtattatctgaaatcaaagggaaaagataatggtacttatatccgtgttgcaggtacatcaaggcaggcatttccggagaagataaaagagctggaaatggaaggagccagaatctcatgggatgagcttacttgtgtgggttatcctgtttcagaggaagcaacagagaaactttgtcaggatatcgaaaagttccggaagaaggcaggaatggcagagcattctgtaaagaaagagcagctgataaactggaaaatcttgaagcagagcgagggacagcttctggcaacgaatgcctatgcattgctgacatcagattatttttcattcgccaaaacacaatgtgcggtattcaagggaacagatcgtgcagtgtttctggataagagagaatttacaggaccaatctatacacaaatcgaagaagctgtagactttgtattgagaaatattcgactcggagcaacgattgatggattggtgcgaaaagagaagtatgagctaccaccggaagcaatcagggaaatgatcattaacgcccattgtcaccgtaacctattggatgaatcctgtattcaggtcgcagtttatgatgacaggttggaggtgacttctccaggcggattatataacggattgacttatgaggaagtcatgaatggtcattctaagatccggaataaaggtattgccaatatattcagtcagatgggactcgtagaagcatggggaagcggaataaaaagaatcctgaatgctgcagaagagtatggacttccgagaccgagatttcaggaatttgataatatgtttcgggtagaggtgttccgtaattcatttccgatgacaaatgaaaaagaaagcatcggagaagcatcggagaagcatcggagaagcatcggagaagcatcggaggcagagtggagaacagatctcaacgatacacagcaaaagattataaagttgctttcagaagatcatcaattatcagcggttaagttagctgaaaaaatcggggttgccagtcgaaatattgagaacaatattaagaagttaaaagagtatggtattcttataagacatggatctccaaagaatggttactgggagattgttgataaagatctacaggagtgagaagtaaattagtctaagattagtccaagagaatatatagataaataacaaaaatagattgacattttgtagtaattagtagtaaactgtacttgtggaagggaagtgatatgtttggctagaaaaacaccaaaagatggcaaagaagaaaacatacgagtacgggtgactccagagcaaaaacagagacttgttgagtatgcagaaagacactatcagagcatgagtggtgttgtatgtcaggcattggatctcctgtacgcaagagaagaacaacaaaataataaagagtaaaatggagttattttggagtttatttcttcataagcggtgcgaaaagcacagaatcagaacatatgttcgaactataagcctctaataacagcctttgcgtgtcatgaaatgcagtccgcaaaggagtttgaataatccacacaatcacgagaaaccagtattcatgcgggttacaaacaaatttgtttagtgattggcaacaaaatggcaacattttgtgattattcaagagataaaaattttatttcataacgtatataaagaaaccttactgattttcagaagtaaaaaactgaatatcggtaaggtttttcttttctcttatttttcttttttagtcaattcttttacgaggtaatcacttagttcctgagatggtaccttggcacgtttctggtaagtatccagttccgggtacttatatctccattcatcatattcttccttgctgatttcaccgttttccaatttgtcagcctgttccatccatgaacgaagcatttcatcaacagatgagccgggagcagatatggaagagtcaaggcagatatgaggctgcccatctacatttcttactttcagaccatacatatcttccagtgcaaatagtgtatgcatcagacctatgtgagtatcaatatctggaactgttaaagcatgagtattgacatcgaagatctgagacatttgttttacaagatcgattttaggaactctggcttcagattcatactgagccatgcggacatctgaggtttttcctttgaatcccagttgctctccgagttgcttttgtgtcatgcctttgcggttgcgaaaaaatttgatacgttgtccgattgccatttttgtttgcctccttatagtggtcattcgtgttgccataattaattgtgaagaaaataaaacaattctgtttaggttcagtatagcatgagcaattttagatagcaagaagaacttaaacaaaaaaatttaatattcttataaaactgcttgacttaaattaaaatgtttagtatcatgcaaatgtaacgacttaaacaaattgcgttaagatagagaggggagatgcgatgtgacgaacagaacttttatgacagtagaagaagttgcagcggaactgggagtttccaagtcttatgcttataagattgtcaaacaattaaatgatgaattacagaagctgggttatcttacggtagctggcagagtaaacaccaattatttccgcaaaaaagtatgttacagcgaagtgtaagagagaggagaatttgtatgagtatttacaaagataatgtcactgggaagtggcgagtggtttatcggtataccgactggacagggaaaacgaaacagacttcaaaacgaggatttcctacgaagcgagaagcgcagatgtgggaacacgaacaaatgttaaagcatgatgcaaaactggatatgactttcgcaagtttttatgaaatctatgtagaagataaaaaggaacgaatccgggataacacatggggaactaagaataatattgccagaacaaaaattcttccatactttggggagagaaagattgcagaaattgaaccaaaagatgtgattgcatggcagaatcatttgcttgcatttaagagagcgaatggaaaagggtattctgcttcatatctgcggaaaatccacagccagttaagtgccattttcaatcatgcagttgatttttatcatttgccttctaatccggcacagaaagctggaaatatagcaatagaggaatataaggaaatgttgttctggacgaaagaagagtatttgaaatttgcagatgtgatgatggataaaccagtttcttactacgcttttgaaatgctttactggtgtggtatccgtgaaggagagttgcttgccctgacaccagcggattttgactttacaacgcatacactgcgaattaacaaatcatatcaaagattaaaccgggaagatgtgattaccccaccaaagacatttaaaagtaacagatttatcaagatgccacaatttatatgtgatgagatgcaggattatatggaaatgctttacggtctgaaggaagatgaaagaattttcacaatttccaaatcttatctgcatcatgaaatgaacagaggatcaaaagtgtctggggtgaagcgaatccgtgtgcatgatttgagacattcccatgtatcgttattgatcaatatgggatttacggtattggcaatcgcagaccgaatgggacatgagagcattgatatcacttaccgatatgcgcatctgtttccaagtgagcagacacagatggcagaacagttggatattgaaaggatggaaaaattaaatggagaaaaatctggacagtaaaggaagatggagaaacaaaatcgtagcattccgggtatcaccggaagaagcagagcagattgatgcatgtgtccgattgtcaggacttagcaagcaggactatatcacaaaacgattaactgatcgggaaattgtggtacagggaaatccaagagtgtataaagcattgcgaaatcagatggcagagatttatgaagaattgaaacatctggaaaaatgcagtgaggaaaacgaagagttgctgagtaccctgagattggtcgcagagacattgtatggattgaaaggggaaaatgaatgacagcaaaagaaaaaatgactgctccgattgcatctgttggcgcagatgtggaacagtcatcaagtaataaattaaccaaccaaagtatagcagatttgcccggtaagggcaatctgcaagccacaaataatgcggaaaatacagcaaaatcagcaaataaaaagaatctagatgatctggaaacagtttctatgatggaattatacgatactgcatatccaccaaaattgccgattgtagatggacttctgtataacggaacttatctgtttgttggttcgccgaaaattggaaaatcattctttatggcacagatcgggtatcacatcagtaaaggacttccattgtggggcttttcagtcagacagggaacggttctgtatctggcattggaagatgattatgcaaggttgcaaaagcggttatcacagatgtttggaatggaaggcagtgagaatttttatttcgctacaaaatcaaaatcgctcaatgacggactggaaaaacagcttgtaacgtttgtaacagagcataaagacgcaagattgattatcattgatactcttcagaaggttcgagaggtcggtggagataaattcagttatgccagcgattacgaaattgtaacgaagctgaaagcattcagcgataaatatggtatctgttttctggttgtgcatcatacaaggaaaatggaatcttcagatagttttgatatgatttctggcacaaatggattgcttggagctgcggatggagcgttcgtcatgcagaaagaaaaacggacagataataaggcagttctggaagtggcaggacgtgaccagcaggatcagaaactatggttgaactttaaccgggagagatgtgtctgggaacttatcaagacagagacagaactttggaaagaaccagaagatccagtgttggaaaaaatcaaagagcttgtaacagaaactacgccagagtgggcaggaacagcaacagagcttgtggaagtattgcaggtggaaatgcagccgaacgcattatcacgaaaattaaatgtcagccttgaacgattgattctggaatatggaatccagtataaagcggaacgaggacatgatggaagaaagatcagattagcctttgttggaaaccaagtgtgacgatatgtgacggttgtgacggtattttatatagcgtgtcagtagtgaaaatatcgtcactatcgtcacgaccgtcacggaaaggagaaacatggaaagaaaattacaggtgcagataccaaaagatttattactggcattgttccagtatcatcttgccgggaatgaggaatatcaaccggagatagaaaaagcattgatggaaaaattagacagtatggtaagacgtcagttatatacaacattcaaaacagcaccaaccgaggaagaacgggaaaaggcaagacaagagtatttggataagtgtggaatgcatgagaactttcgttggtaaagattctgcttgatgaccttatgacaggagcgtgccacgcacctgtaaatagcagacaaagagaaggtttgtaaggtgtagccggtagttgattggcgaagaaaaaacttttcaaaagggggccctgattcagggcgtccctgcggaaatgataaatgaagggagaatgacaccatgagagaaggaagattaggttacaacagttataacaaaagatatggattattgtcctcagacttatggattgatccaggatttcactgcggagaatgtctggaagttctagttgataatcagtgggtaaagacacgaatggaaatgaatctggcgagagaatggtatttggttggaacaccatattgtggagatctggagtatgtacgggcaaggatacaggaataaagcagacagaaagagaaatagccgcttggttgttagtgataaaaaataagcccggatacgggcagaaaaaagagggcggatacgcccaaaatgaaaggaaaaagccaagttgtggtagatgtaagaagcatctcacaaagccctcggcgtttgagagcgaaatacacccatcgcacaaacttcgtttatgctctgtgtatttcgccctgccgggagctaatatagccggaaacggcagttagttcgtaaacggatgccgattcatccactcacaaatgaaatggcggaatttattttgccgaagacaaggagggagtgcctatcggaagaaattcatttattcaaatgacaaaactaagcaatgtaaaaggcagaatcacttatatatccagtcatgcaaaacaggaaaatctctatgcagtttatgaaactacagaacggaaattctggcgggaacttgcaaaatgtaatcaggaagaatttgtaaaaagcgggacagaaggaaaatgcattgaggcaagagaattgattattgctttgccagagagtttcgcagaatatcagccggatagattgctacagctttttacaaatcattttaaacagaattatggaacagagtgtattgctgctttgcaccacaataaaagaaagaccaattatcacattcatttgatatttgcagaacggaaactactggatgaaccaatcattaagactgccaacagaaatatgttttatgatgaaaatggaaaacatgtccgaaccaagaaagaaatattaggagaagatggagaaatccgggaaggctgccacatcgtaaagaagggcgagatttatgagaagaagttgtttacagttaaagatgaacggtttaaaagcaattccttccttgatgaagtgaagcgttcctatactgaactgattaatctttatgtgaaagatgaaaaccagaagttgcaggtatttcaacgtggcagcgtttatcttgcaacaaagaaaatcgggaagcgtaatcccaaagcactggaaatcgaagcggataatcggaaacgccaggaatggaatcgggcggtggatatggcactgattagcggcattcaagagccgcagattatggaagtgaaacaaaaaagaatttcggagccgatcaagagtgcaatttcccggaaaggaagaaaaccaaacttatttgcaaaagttgtcgcaatggcgattgagacattggaactgatgatagaaactgtacttgtgaaaaagtataaggaatcattggagcagaaagagcaattacagaaaacagatgcttctgatatggagtccgtaatgccagaaacagaacgaacagaagtagaaataaaagagccagtggaaagacagccagagccaaagcagccggaaatgacaaggctagcatcaaaatatccgagattttttaagatcaacaatgaactggagcagcagaataatgcaatttacaagaaagagaaacagcgtgctactaagaaaaaagaattgtctgagatcaaaggctggtttaaaggaagaaagaaaaaagaattgcaggaagaaatcgatgatctgacaagccagatccggaatatgaaagattatcttccgaagattgtacagaaagtaggctatagaagtgtacaggaatttctgaaagacttcaaaacagcaaagtccgagtacaatcagtatcagaaggcaatcgcacaatggcaacaagaaactggaaaagagccagagccgcagccgcatggtgtcagggcaaagctggcagcaaacagaaagaaaatagaacaggaacagaaaaacacacaacgtacccaaaatcagagcaaggatcgaggggcaagataggaggacaaaatcatggagaaacacattatgggagaaaatggcatcagctatactttgggagaggatggtctgtattatccagacctgtaccttccggaggatacggagtatccgattggaaagtatggaatgttacgaaagacgtatttaaaggagcatcggaaagggctgtatctggagctggtacttgacgggaaactgaatgagcatttgcaccagattgacgaggagtgtcatcagatgatggataggctggtggagcagatgaaagaacagcagggcgtgacagaagaattgaagatgcaggatccgatggaatgggttgggagaatgaataatatccgggcttgtgcggaggagatgatattgaaaaaaattgaatgttaaaaataggattgcgaataataaagatatatctttattattgaagatatatatagtatgatataaaaaaaagattggagaatgtatatgtcagagcaaactattcaagagggattatattcaataccggtacaacttgataaatatatttgtagaagtttaggagcaactacaattaaagatttagtaaaaaataaagaagtcacaggtcttacaattaaagaatgcgacaaaataaaagcaaataggccagatgtattaattcttaataaagataaacagattgtagtttttatagagatgaaagaaccagataaattaaagacggaaaagcttcagcgattagcaaaataccaagaattaggagttgcaagacaggtaaaggcaaaaatatatatgttgtcggatggggaaacttttatatggattaatcctattacaggtgctcgtattacggatgaaaatgataaaccaataacacgaaagattaatccaaagaacttgtcacctgagcagaataaggaacttgctgagtttatagatgatgtatgctattgtataaatgattcaaacaataaaataatgccaaaggagtatattgatccaacgcctttggcacaaaaagtagcacgtatcttgcagaatatgtcattatcttcagctaaaaattcgctatatacatttgtagaattttttacttttaaatttttatcagatataagcgttttaagggggatttattcatttgaagggatatattctgtttatgcagaacagagttcaaaagatgcatttattcaatatctgactacagtaagaaaaaaattattagagctttttccatataatccagaagatggaacaacaataataaatggaagaatttttcatacagagacagatgatatcggtaatcctgtaatacatgaaagttcggcggattgttttggtaagctactcgattgttttaaagaatatgaagatgaacatggaaagttcttatatataaataaagatttcaaatcaaagcttttcgaaacttttatgaaaaatagtacggataaagatggaatggggcagttttttacaccgctaaaagtagtgcaagagatggttcgcatggttgatgtaaaggaaggaatgagtatatgtgatccggcatgcggagttggtaaatttttgcttgaagcagcatcgaaaatttcttcaccattttattttgaaaatggaaagttaaaagccaaaattgaattagtaggtatggaaaagaaaatggaagataacacatacgatttaacaacaatacttgcgaaatcaaacatgttaatctattattcggacttgtttaaaaataattgtgattctattgaaaaaatacaagaattatcagaacaactgttaaataaagtgattacttccagtcatactactttaggaactttagaaaatttatatttagacaaatatgatttaatacttgctaatccaccatattatcagagtgctgcgattagtgaggcgagcaagtcggttaaaatatatggaacagagactaaagcatatacatctggaggaagaggaatagaggctctttttacagaatggattgttaagtccataaagaaaggtggaatagcgaatattatattgccagatggtatctttactaacataggaaataataagttaaaacaattgataatagaaaattgctatatagatagtattatttcattaccggtggggacattcttcaatactcccaaaaagacatttattcttacaatccataaacgtacggaagaagaaatgaataagatacagtcatatccggtttatacatatctttgtagtacaataggcgaaactatggatacttatagatttgatattgatgaaaatgatcttcatgatgcggttgatttatataatttgtatcgtggaaataaagaaaataaaattgcaatatctgcggtaaatgataatccaagagcaaaattaattccggtagataaatttggaatcgaggagaattggaatattgaactgttttggtcggatgaagaaaaaatagaattaggtattaaaaagaaagatacaattatgtcattagaagaatttcacggatatatatcagaattaattgatgatataaaaaattatcaggaggctatagaatgcctgaagtaagaaaacaatctttttacatttatgaaatatgtgatgtggctaatagtgataaaaccattacgaaaataaaggccaaaaataatgtgggagaatatccagtttatgcagcaacaataaacaagccatttgcatatattaatttttataataatgaaaaaccatgcttggttgtaattaatgatggagcggcaggatgtacatatttagttaatgataataaatatacaataggaaaacatgctacggggctaattccacatgatggaattgatataagatatttgcagaaagtagtagaaccaatatttaccaatattgctaaaggatatggattaggaaacttgccaaaagcagatatattaaatactaaagttgaaattcctgttaataaagacggaacttttaatttaaatctgcagaaagagttagcagaaaaatattcagttatagaggaacagagaaatgttcttttgcaaaagagaatgaaattacagaatatgtctgttatcctgccagaggataagaatataaaatgggctcatccgttagttactgatttattttatcctaaaggcggaaatgctgactttacaaaaacatgggtgtcaagaaataaaggagaaataccactgtactcaggtacaactactagtgaatatgctagagtaaatattgctgaatactcaggagaatatttaacatggtgtattgatggattggctggttatattatgtatcataatgagaagttcagtataacgtgccatagaggcattttgttaccaacagataaatgtgtagatattgatttgagatatataaaatatgtgttagaacctatttttagaaaacggaaaaaaggaagggaaggtgatatgggtaagaatgaatacacatcactaaaacctatagcaataaaaagaatgacagatactatacctattccggtttctgaggatggaaaatatgattttcaaaaacaaaaagaattggcagataaatatgaacaaattgaagaaataaagagaagtatcgctcaaaagatcttaaccttatctgaaataatagtattgtaggaggaaatatcaaaatggcacgagaaaaaaaagatggacgacatataaatttgtatattgaacgcgaaataatagaatcattagaaaaatattgtgaaagaatgggacaaacgaaaacagttgctatagagagagctttaaagcaatatttatcggaatatcaaaataaccaagaaaaataatgtattgaataatatactgtgttttctgaaaataaagagaaatacggtttatagtgttattagatttaagataaatgaatggcattgaaaataattgaaatctcgcaccattggtgcgagaaatggagaccagaatatggaaaagaatgaaattcgagggtatgaaccattagttgaggaattaaaacaattaatacataaaaaacaatatcatgtgttaaaagtaataaatgcagaaactatcaatctttactgggaaattggagaagagatttataaacagcagcaagaaaaaggatgggggaaatctattgttcaggttttatcaagagaattacaaaaagaattccctggagcaaagggatattcagcagcaaatttgtggagaatgcggaacttctatttaacatatcgtcattcagaaaaactcgcaccaatggtgcgagaaattagctggagcaataatattattattatggagaaatgcaaagacgatttagaacgagaattttatatacagatggcaaagcgttatggttggacaaaacgggttttgacaaattttgttgaggcaaggacttatgaaaagtatttgctaaaccagacgaattttgatttaacgattccagaggatagaagaatacaggcgaaattggctgtaaaagacgaatatacttttgattttgcggaattatctccagaatattcggagcatgaactggaattgcaattggtcaataatatcagggattttttgatcgagatgggtggagattttacttttataggaaatcaatatcacttaatggcggggaatagagatttatatatagatcttttattgtttcatagacgtttgagaagtttagttgccatagaactaaaaataggagagtttgaggcagaatatgcaggaaaaatgcaattatatttgacagcgttggatgaacagataaagttaccggatgaaaatccatctattggaattattatatgcaaaagcaaggacaagacatatgtagagtatgctttgaaaaatattaatatgccaattggtgtagctacatatcagttgagaaatacattgcctgaagagatgaaggaaatgttaccagaaccggaagaaattgtaaagagattaaaagtatttgagaaattgtaatgatggattgatggggaactaaatgaacaatgacggattaacgatggattaacacaagtgagaaggagcgagcatatggctttagcaaagtggtataagatagattttcatacgcatacaccggaaagtaaatgttttccagataagaaagtgacaccaaaagaatggttaaaatcggctaaagaatcgggcattaatgcagttgtagtaagtgatcataattctgttggatggattagtaaaatagaggaggtgaaatcggagttcgaggacgaaaattttaaggtattttatggaattgaactttgtgtatcttcggattttacacattttctcattatttttgatgataagatgtccgtaacagaaattgaagatgcagttgttagcaatttgggattattaagaaaagactgggctgacacaacgattaacgtatctgaagataggttaaaaacattatgtacggaattaagggaaaaaatatttgtaattcctgctcattttgcatctaataaagggcttggaaaaagtgcagaaaatgccataaaaaaatatcaagagtttcttttgttttcggctgttgaagtaagaaatgaagaggatgttagggaatataataacaaattaaaaaataaggctattaataaagcagtattaataacaggatcagataatccgtcgaatagagatgaagcacagcattcaatcgaagggttcgggaaaatgtttacatggattaagctttcaacattatcttttgaaggacttcgccaagtatttattgatccggaacatagatgcattaattggttatcacttcaaaaaataggtgtgcagtttgatcctaatgaaactacttataattacataagtggcattgcgtttgaaggaatctctcatatgacaaaaatgaatatgagattttcgcctaatttaaattgtattgtaggagggagaggaacaggaaaatctactattgttgatgcaataaactatggcgtatgtaatgaacatgatctttcgaaatgtagattgttggaaaaaacattaacaaaagatgcaaaaatttcaacatattttaattttggtagcaataaaccatatgtgataaaagcctcaagaaaaggaaaacaaattgtaacggatgttgaagataataatggtagtgttgagaatcctccagaatttaagatagatttttatggacaaaaagaaatctttaatttaatagatgaagatgataatattgcaaatcaaacaatgagtccattagtaaagatgattgatgataaagtatcggctgatatgtattcatattctgatgaaattgatagtgcaatattaaatatgcaaaaatattcagatgaattcaagagcaatagaaagaaaattaaggaattgcctacaataaaagcggaaattgaaaaggcagatactatcttaaaaaaatttaaagcaagtggaatagaagaatcgagaaaagattttgaaaatatagacaataagataaaaaatgtggaaaaatcgtttgcttcagaattgaacgctgtaactgtagctgttgctagcttcgaggaacagaatagaggattggataatcagatggaagcatttgatatatctgtagaaaatgcaattgaactcgaagtaattgaaaagttaaaaagcatcaatcaaagtctcattgaaattttaaatcataaaaaggaatctgttgaaacgttgaagagagaatatgaaatatccactacttatgaaaaacgtgaggaaatccatagaaaatatttaaatgcgttagatgaagtgaaaaatactggtggagaagatattaatgcaattcaggatcaattacaaaaaaataaaaaaaggtatgacgatttgatgtcattacaaaatgaacaaggtaatatcgaaaagaaaattgaagagagtatagacaattttattgataagcggattgaactatcaaaaaaaagacaggctgtaattgataacttgaagttggaaaacatatcaattaaagttattccattaggtcatttggcacgatggaaggcaaatttacagaaggaatttggaaaagaaggaacatttgataatgattttcaaaatttggctgataaagtactatctaaagataatagctgggaacagtatagagcatttttgaagttcatgttgattacagattctggaaatgttgaaaagtttttgaattgttctacagatacaagatttgctaagctttggacagataaatataataatgacacattgagttcaatgataaaagttcttccagaggacaaattgcaaattaaaattattgatgaaaatggtgaaattgatattaatgaaggatcgccaggacaaaagagtgcagcgattcttgccttcatattaaatagtggtgagaatccattgattattgatcagccagaagatgaccttgataatagtcttatctattcgcttgttgtaaaatctataagaaagatgaaaagtaaacgtcaaattattatcgttacgcataatcccaatattccggtattgggtgacgcagaggggattattgttttagaacgtaataatcagggaaaagttactttcagaaaagggaaaaaggcaggctgcattgaggaaaagcttattagagagggaatttgcgaaattatggaaggtggagaagatgcttttcgtaaaagagaacggaaatatcaatataattaaaaaataaatggtatggaacttgcagaagataaggatgaaggtggatttgtggtttttatcagatctgccaggctgtattacctgggcgagagcatagagagtgcagcagtaaatgcattagatgcgaaaaaggcatggcttgaagcatattatcaaaataatgattgcgaagtaatcttaacgtagttataatgaaatggcaacaaattggcaacagaaaatcagcgagccaaaataatatatgtaacagagataaaataacggcagaaaagaaataaaaactaaacaaatatgtttaaaaccatcatcggacttgccgagtttgaataatgagcaaaatcccagaaatcctttatttacaagggtttccgggattttatttttgtccgtgatgctacggtgatgttaatggggagaaagtgtcttatttttggggattttttgttattatatgatactgtacgtttcatatgtttttatcttctgcattatcatttgtggctcttacttcattgagagcgtcagcaagcttcctgtcttttcctgggtacaaatgagcataaactttccaggttgtttccggtgattcatgtccaagccggtccgaaatctctttgatagaaaacttcatgtcaatcagcatacttgcgtgggaatggcgaagatcatggatcctgatctctggaagaccagatctggcagttgcgcgtttaaattctgaccgcattccggacttctggaaatagaagatgcgttcatccggctctatggccatacttgcaacatagtcttgaagctctttgtacaacgattgaggaatattcacgacacgtttgctcttttcggttttgggtgtctggaagtattgctcgccttttataaccacaaagttcttgttaattgatatggagcagtccggcaggatatccgccggagtaatagccagaacttctgcagatcggagtcctccatagaacatgaggctgaacgccatccggtacgcacttttcttttcaaaggtaaggaagtagtcaaattgctctctggtccagatgttcatttcatctgcactacttttcccgattgcaccagctgcaaggcatggattgctccggagcttatagtatttgacagcataattcatgatagcagacatctggttattgatggtcttcagatacgtctgagaataaggatttcctttttcatccctgtaattaatcatggcatcttgccaccgatggatcacgatcggagtaatgtcaccgatcttcatatctttaaagaatggcagcagtttcatgtctatcagatactgcttgtttttcaaagtggtcagtttcagccgggagctgcagtctgacatataattcttgatcagagcagaaaacaggatatctggatccttggctccctgtgccagaaagtcacgttcccattctatagcctcttttttggtagaaaacccccttttgcatttatgctgacgcttgccaagccaatcatcatagtagaagttggcgtaccattttgtttttccatctttggtaaaatacttataagccggcatctgaatcctccgttactaaacaaatgtgtcaagcaaatgtaatcaacaaatgtttgacaaaaatgttgaatatagatataatgtacttaacaagagaaccgttggtcagtgcacacctgaccgccggatagagtagtaactaaaaaatagcgccttactttaccagagcaggggcgctattttttatgcattaaattgataacaagagttacaactgcacaaagcataattacaaaagtaaataaatcaccatatgtaaccatcagcaccagcctcctttcaccaaagtgtccggcggctgacataacaccccaacggttccccagttaaatatactattctgttttttcttcttccatcttctccatcattcccaaaaagatacgttttcccttcttggataactgacggtaccgcaggatgatatcctgttcgtcttctgaagcaatggcacagctgtattcagaattacccacaaggtaatccatagaggtgtcgagggcttttgacaggcttgcagtggcatctattccaggaacagtctttccggccagaatgtcacagcaggtttcctctgtcagcgttgattttttgatcaggtccggaagactcatctgcaactgagccaaacgggcttttgttcttgcttgcactgcggaaacttctttcggatccgcaacagcatatcttgaagtagtccggccaagaatgtaatctgctggcacaccgaagcatgcagcactgcgattaacaaattctgttgacgggaaagagtaacctctttcgacattcgatactacttggccagaaaaacctattgcttttccaagttcggactgacgcagattagcctcagcccgcaattcttttattcgttcaccaattgtcataaaatctccttgattagtttgccggttcatattcgtatccgctttcggaagccgatatataacctaatggagttgtcacacacccttcatcatctaattcgccatatgttccaagaccggtgaaagaattggaaaatactattccagttccgtcatcacatattatagaaaaccagttatatccactattttttattttgttctcgagaaaagttgcgtatccgttttctgaaatctgcgacaagacttctttaggtataacaatatatgcacgctgtccaattacatcagtaccatttccgtttgttacatcatcacacattataatagcatttaacaatcgctgatcgttttcgctgtctgtagtcgaaacagaatctgaagacggagtgtctgaatcagaagtagctgcactactggaaagctgctcttttaacgaagcattttctgctttcaactcctcaatttgtttctttaattcttccactgttttcaatagttttgtgttttcagctccctggatctgatctggcgcttgagaaaaagcgtctttttgaatttgcaatggatacgaagtacccgtgccaaatggaaattctgaaaaagttgtatttaatacttgaaaatcgtttattccataatctgttaaatcttgttctctgaaatgaaatttagcaactcctttttttcccgcagctatacaagtgcccccagaatatatggtaatttgaaaaccatctatgtctgaaccgtctaagccaaagttaaaatcatgatctgaatgattttgaatcataaactctattgcgtaattccctctttcgtaaaaaatacgttgtacatttactgtgtattcttcagtatcacaaattagagaaacaggagattcggcatctattcttatggcttcattgtctgcaatagtagatgcagtttcagaagcagcgtatacaaaaagattgtttgaaataaaaatatttgaaataagactacttgccaaaatgatagcaactgtttttcttctcatatgtttatttccccttcctgctccggtaccactcgaagcttattattttgctttcttaagaggttcgacagtatcttcctcctgtcgctttaaacattttatgtacccctttaattcacctcgaaattccaactgcgcatcatgtggaagttggtgaatcaatgctaaccattcggaatcctcagagagaacatcttgctttgagcttctttctttgcccgtaagcaaataatcgcttgacacacctaaaaattcacaaattgggattatcatttttgcaggcggatcagtccctcgatttttccaattggtcatagtgcttgtgtttatcccaatagcccgacataaatcagtggctgtcaaagacttttcttcaagcaacgataaaatacgctgagtgatcatacaatcctccaaaatcccaaaatgtgaaaaaatacggttgacaaattcacaaattgggattaatattaaaaatgtaataaacaaatgtttaatgcaaaacaaaaaaagagagagttacatcgatgataaatcggagagcaatgctttgttgttttcttcaatcatggccgccacagcaatgataagagcctcagcagatgcttccgacataacagtgtttccggcaggaataccgtttcttaataattcagaaagaatccggcggttttcgtcaccataacgtttaagcccaattcttctgagattatcaatccaattatccatgataactcctttctgattattttaatgcaatcgcaaacaaatgtaaacaacaaatgtaataaacatttgttgaaaacggaggtgatattttgaagcgaaaactgtctccatggtgcaaagaagtaaagaaaaccctaattgacagagatatgtctgtcacggaattatgcggtgaagttgggatgtgcaggaactatgtgacaaccaccataaatggaagaatgtatgcacctgcacttgctgaaaaaatcagcaaggctctggatatcgatacagagtacacaatttaattatcataacttgattatacagcttatagaaggagagaaaaatgtcgaaatttgctacgaaagcagcggctaatatgttttgccaggcacgatatgaggcggcaaagtcaaatgagcgtctgagcagcagagaaggtgctgcggaagaaataggaattgatcgtacaaggctagccagaatcgaacttgggagcacaataccatatcaggaagaggtccttttgatggctgactgctataaggcaccagaattgaaaggaaattattgccgggagatgtgcccgcttggaaagaacatgccgaagatcgagaatgcaggactggatagaatcagcctgagaatgctttcttctttaaagaagataaacgaggcaaaggaatcacttcttgatattacggcagacggaattatctcagaagaggaaaaaccggaactgaaaaaaatcattcagacattggacgaagtaaatgagatcacgcagaatctgaaaaattgggttgagagaaatctggaatgaggtgcttggtatgaaaaatgcaaacggtgtaatcaaaaagcttacatctgcggaacgttcttactatacagccgctgaggtcagagaaatgatgggtgtgagcagggatacggcatatcgcatgatacgctcccttaggtcggacctgatagccgatggacagcttgccaaagggtatccgtcagggaaaatccccaaaaaggcatttaacaaattatacatgatttaggtaattgcgaaactcgctaagttccttagcgatctcgaagcaaatcaggaaagaatgcttgcttttcacggattgtggaatgaaaagagaattcttacacattttaggcgcactttaataagccataggctttatggagttggtaagtcctatgcaatgagaggttttaagctgcgaatgtattcatgatgcttaatcttatgtgcaagaacaacagtaataagctgcgtgattccggaaaggatcagatcagcatgtaaagtcttctcgttttgagttcggcgtcctgcaagacaaagattatccttgatgtgattgatgtctctttcaacaactgttcggattttgtaggtgttgtcccattcttcggttccccggattgttccgggataagcgcgaagatccttttccggatagatgtagaccattcgtccacatttagatgaagtacaaggagtttcacaaaaacattggcgatgtgatttctgggttgctttatcgtaaacccatttcattttaggacaaacgaacttaaaagtaggtattccgctgcgtaagtttgatttactgccctctggcttcattaggagcaatgttccaggtatcccgagtagtgcattccagattggattccgaatatgccatttcctccaccgccagaactgtacatattccagttccttctcaggtttccgctccttacaccaggtggacttccaggagctgaaggacttggattggccaataccgtaagagcggcgttcctgagttcattggcaccctgcatcatctttgcatcaacctgtcgtttggtttgctctacgcgattctttacttcttcctgtacagctgccgctgctgcctccgggctcatttcagatcattcctttcttcaagataggcaatgccggcaaacccaaggtctccggcattatcaacagcaagaactaaatatgctttttcctcatatgcaagaatatctgactttttgagatcacatcttccagataccacaagggtatgcgtcagggaatgcagtttctggtcccataggtgttttgtcagctccctctcattcgaagtcgcctgtgcaagaattccatccactatagttcccgtatcctcatatgagttctttgcatatccatctacattgtccacatgcatcttcaatacccggaagctcttccagagattccccggacgaatgtacattatgtttccgaacatcatatatcttccccctctgtttcctcatgtgacatcattccggcataaaaataaggcggtgttatccgccctgtttctggattttctgccaacggaagaattgcttcggccgaagctgcactggctttcaagtcttttttcagatcctcatacatctctttccatagtttggcccgttcccccatggataaggagagtgggccaacctttgtatcgggttcaaatgcaaacttccgcataatgctttcaaggcaacgaagttttgcttttttccattgtctcgccgtcggaaccttttccggaatcaccgcattgtattcctcatcgcagagcgcacaagtcttttcttttccctcgaccattacatctccgagttcaaaacgcatacggtcttttccgtattcagcaatattccccggttcgtactgatatgttccaggcatcaggcatctattaatggcgaaaggaggttcttatgcgaaaactggtggattggttaatcggaggtaatctggatcggctcttaaaagcactcggaggggaagagtaatgctcgaaacattttgtttgtctgtgcttggcagcggaggtgttgccggcattttttttgctctgattcgtcactatattgagcgaaggctcatggaagtggaggcacgagagcaggaacgcatacctgcccttatcgatatcaacggagattatttcaacgggatctcagattaccctaagatgactcacggagaaatcgaagatgttgatgtgaaatccgcaggacagtttatcaaggatatgacgggtatcggagtcatcgtgccagatgatggattggaagactatgttcgtgaaatcgggcatcttccggaaaggactacggacaacagaagagaggatcctgtaaggacaggacagcagaaccagaatcagccgccagaggatgatctggaagattcggaagagatagacgacgatcaggacgagaagaacgccgaagctgcaaagaggaggcttggaagggagagatagcgcatgtatatcttcaaaaaaccccaagggctacagagttctttgacagcctctttggaaaacattgatctcacagaggttggaggaatgatgaaccagaagcttggagaggctatggcatcggtagatatgtctgagtcgggagccggattgcaggaaggcatacagaactcattaaccgccgcgcttgaaggaatagatctttcggaaagcgcgcagatgatcaacacctctattgtaacggcgctgtcatcgaccgaaggaggatacaggtatgagtaacagtagtttggtaaattgtacggtaaaaagcccgaatcacagcggagccagaactcatgcaatcgacaggatcacgccacattgcgttgtagggcagctttcggcagagtctattgggggatgcttcgacagttcaagtgtacaggcttcctgtaactatggtatcgggaaggacgggagagttgtgcttgttgtggatgagtgcaacagaagttggtgcagttccagcaatgcaaacgaccagagagcggtaacgattgagtgcgcaagtgatatgtccgatccgtatgcgatgacaaatgcggtgtatgagaagctgatcgcattgtgcgttgacatctgccgcagaaatggcaagacgaaactgatctggttcggagataaaaatacgtctctgaattacagcccgaagtcgaatgagatggtgctgacggttcatcgctggtttgcaaataagtcctgtccgggagactggctctattctcgcctgggggatgtggcgaaccgtgtaactgcacagcttagtgggagttccagcggagaaacaactggcggaggaaatacaagcggcggttcaggcaactataagaccggaatgtacaaagtcaatgtcgcagacctcaatatccgaaaaggaccaggcacaaactacggaaccaacggggttattactgacaaaggaacttacacaattactgaaatccagaatggatcctggggtaaactcaaatcaggcgctggttggattaacgtcagcacagcctactgtacctacactggagccgtatcagggggaacaagttcttctggcggtggcgcttcttctggctcttcttacaagaccggaacgtacaaagtcagtgtggatgaactcaatattcggaaaggtcctggaaccaattacggcacgaatggttcgattaaagatagaggtgtatacacgatcacggagattcagaacggctcatggggaaaattgaagtctggagcggggtggatcaatgttgataaggcatactgtacctataagggggcagcggcatccaccaacggcggttcttcctcatccgaaagttttcaggtgcaggtcagcatctctgatctgtatatccgtaaaggacctggaactaactacgggaaaaatggattttgcccgaaaggtgtctatactatcgttgaaacaaaaagtgctgggggctatacctgggggcgcttaaagagtggcgccggatggatcgctctggaacatacgaagagactgtaaaagaataaaaagatacccctctgtcggaagtgaccggcggaggggatttttttattgagaaaactgtggcgggatgagagaggctgtggtataattctgttgttgtcatacccattccggcaacggaaagggggtgagtgcattgatagaaatcgtgatttcctttttggtcgctgttgcggctggtgtagcctgccactacatcatcaaatggttagacggcgatgacaatgacaactaacctcggtttgtttccgccgtaatggaaaaagaaaaccctcggactgccatccgagggttttcgactagtggtgcattgatagaatacaccgcaatttccttttgcctactggcattatagcatatgtattattgaaatgcaatattcaaaaaaaggatatttcaatatatctgaatcttgctccataacttaatttgatataatctatcatttttcactatgaactaccattatatggtaatttatagcggaaggagcaatggcgaatgataaagattttactgtcgaaaaagcttggcgagttgcggttgacacaggcagatcttgcgcgagctactggcatacgtccgaatacaatcaatgagttgtaccacgaacttgcagacagggtaaacttggagcatttggatttgatatgcgaagccctgaattgtgagttagacgaattgattatacggataccgaacagggaatctaacattactcatacgagacgtggaaatcaaaaaacgcaagagaagtgtcgctgcaacggcacgagcaagaaatgaggaagagagggggttatatcctctcttttcccatttcggactggttgaacataagtgatgctatcaagtaatcttcattgagttggaaatccgcatatccgcgacatatggtgcttatataccgtgtggatggaatgcccggaaccgagttggaacgcataatatataccattgccttgagtcgcgaaccgtcttcgaggtaaacgtaaatgtttttcttttgataaaagactggatacccttcgtagaaatcaagtgatttttcattggaggtagtaatttcccatattccaacaggaacctgatagccttttttataacgtatagaagcgtatgccctagttctgctcccacggtatattaactgccagttcttcaaatatccagattggagcggatgtgcttctggacacctgtatttcatctgttccttatctaagttacttccatatgccacatataattttctcatgttggacctcctttatgctactgcgcttgtaacattttcttttaattttgacatcatatgatatctgcaggttttgaattcatccccataaagccccagccgatttgtaagtatgtgatacatgagcgtcactttcttttctgggcagtatcctttcatacttctgaaaacaatccgaccagtagactcgatagaccatgctgaaagtgctaaacagaattgtatgtaggctttgatccttccggcgtggagtgtactattgaataatctgaactccaccgttccctttgagaaaaagctatggagattaagagcgtggtatcttgtttcgttataatgttcatggcttattccgccccagtatctatcatttgcgtcactataccatattttttccacatcggacgcggcatcggatttcagctttttaatatttgaatataattcctgacaaataggcttgcaccatctgttttttctgtcctcaatatcaagagcttcgtaaattatatcctgtcgtgaatacataaaatttaccattcttcttgtttttatgattgtatattagcatatgtacactgtacgtcaatagaaaaatgaaaaaagttagaaaaaatatttaacaagttagatataatattgacaataataaataaatgctgtattgtgataagtgaaaaggagggagaatatgattacatacaagccgttatggaaaactcttattgaaaaaggaataaaaaagacagagcttcgagaaatggtcggattcagtagcggaactctagcaaggatggggaaaggtcagtatattgaaatgaagcatattgataagatatgccagattctaaactgtgaaatatcggatgtaatagagattgacaggagttcggagacgaattaaattataaggaggggtagccgtgtatagaatcatagcgaggcttaatggtggagaacctacatatgatggaaaaatcaaagagatagagaaaacgtataaagctcgatttaagggaacattaattatgaaagtgatatttgcaaaattactttacgattgggtttttgttgaagaatatgaagaatagaaaaacacgtattttctgtgatgctattatgatgttcatatgtgtgtgaaataaatggaattaaaaaaataccaatataaagtacgtaagaattgtatcatataaataagaaattacaagaaacactctgataaatcctgaattcgaatagttggagcagagcttcaaagcctttattttcaagggttttgaggctctttccttttagaattgcattttgattgcatttttttattcaactgctctgtgatagattgctgtatgctgattgctggtgtaatcggcaacactggttgttgccggagtataagtgagaacaccagttaattttttggcaacttccacgttggtgttgggatataaatgtccataggttcctaacgtagtctgtatcttttcatgccccagacgttctttaatcaataaaggattttcacccatactgatgagcagggaagcatgggaatgtctgagtgcatgaatcttgatacggtgtacgcctgccaatccagcaagtttttctaatgcccgtgggagggtgtgcttactggtgggaatcccattgtagcttagtacaaggtcgcagccctttaaaaccttttgctgtacttcctgccatgctttcaattctttgatggtatctgtgtcaatatagatagtgcgaatactggcttgtgtctttggctccacaaatttgtattcgtccattgttttatagtacagcgtttttgttatacttaaaagtccggtttcaaagttgatgtccgaccattgcagggctgcggcttctccgattctcattccggtcataaacaggagccagtatgaaatgaaaaggtaatgttcgtaataatctcccttgtagagcagggaaattaccttttgaaattcatccagtgtccagaaatccacttttgttttcttgctcttgatgtttcctatcattcgtgatggatttttctttgcaagaccgagaacaactgctctgtcaaaggcaatggagagcataccctgtacaatacggatatagtttggactaaattcttttgcgagttcaagctgccagttctggacgttaatgggttctatctcatccaccgtcattttgtaaaagtatgaaaaatgcttctgaatggtagaacggcggttcagataggtgctttcctttacttgtgttttataccaaggaagataagtttcctcaataaactgttgaaaagatagctgctgtttcttttctgttaattcttctgtggatgtcagcataagttttgaatatgcttctctggcttctttttttgtcttgaatccacttttgtatttctgaatctgttttccggtaatcggatgaaaacctaagtttgctctaaaataataagttccgttttctgctttcttaatagggtcttttgccatgatttcactccttacataaatgtgcaagaagtacaatcagtttgatttatcagtaaaagtaatccctagcaattcttccacagcttctctgggaaccctgtccagtttgcgtgactgatagtaggtatgcccttttgaaatcataagtttttttgcttctcttatgatgtctgctgcgaatgaagttccataacccagttctattaagtctttttttgttactgtaatcatgttcctcctttccatagaccagatatggaaccctcaatatctgtctatattatatcagattttgtggcaaaagtaatattaagattgtatttcctgcaaatagttatttgattttgaatgaaaaattctaattcaaaatggtatctaagcaagccgaacagctttcgctaaagctcatgggaatctcacccctgcatggttctcatccagccgtaccctttgccagcggtgctacatcatcacacggactaaggctgtacggaagtatcattatcacaatagaaaggtcatggcggcagctctgcggtaagctacttatggaacgctggcaggaatcgctatccggtatcatccctcctttggtgggttacggcgtgccagcccaacggctctctttctatcgaaacgtattcggctgctttatgctgcgttgattagacgctttctttttcaaggaacaatccggctttgtcagcctgttaaaatgcactggtgataatgcactttaatagactggcaagctctgtctgggaagcatgggtttgtccacgcttccacaggcgagcgttatttctagtttggttccctgatttcaaaagataaaatctttgcaatcagacgtgtttccatccggcggcgtagggtttcatctacaaccatgtgggtatttccatattcgtctttcatgggacgcatggaacggctggcaataaaaccgctgtaatggcgtacaatctggttgactgcttcaatatcgccgtccgtagctcttacaatcacaggaaacggaatcatagggtgctttgctgtcatgcttcgtcctccataaattttttgataaattccagtccggcgtgtcttcttctctggatggtagaacggttgacttccagaatttttgagatttccgtatcgtcaaatccaagaaaataatatcgcaggataacgtcacgtttctttccgtccagactttctaatgcttcggctaacaggctgttttcaatgcggacagtaaatccatccatttcaaaagtatggaagtgggatggataggtgtcttcggaagaaaacagattgacggtgtaatcgtccatatcacagaacagggtttcccgtttacactgtctggacaacgctttgagatagtctttgcgttcatcctccatagcgactttacagatataatcaaactggttctctatggttgtctgaaattcagatggcttcatcattgttcaccccctttccagccttgaaagggagcgagttgataggaatttctgcttctttcccccttttcgctcttagtcccgacaggacagggggtgcagttgcgttttgaaaagaaaaatttaaaaactttttcttccaactaaaaaagcacgcaaacagacgatatttctgtttgtgtgctttgatagttctttctatgtattctgaaaaaccacattgagggtcagaattttctagtgtaggtagatggctttttttaacggtttaccgaatgtagatatatttaagaaaatattttgcatagcggcttcctcctgtaagccgccggagcctaaaaaaagctgactttaatacaacctccatatattctggaaaaaagaaagacggcggcttttgtcaaaccgtcgtctggaaagatttatgagattttgacgcaagaaaagtgtactgccaaataacggttttttttatttccgtttcggcagcatagttttatctttgatacgcataataggaactgtacaactatacaatacgtttttctatacctgtcactattacaacaggaacagtaaaatgtacagaggtggtgtattatgcgtaaaaaagaagataaatatgatttcagggcgtttgggcttgccataaaagaagcccgtaaaaaacagggattgacccgtgaacaggtgggagcaatgattgagattgacccacgctatttaaccaacattgagaataaagggcagcacccaagtttacaggtgctttacgaccttgtatctctgctgaatgtatcagtggatgagttctttttatcctctgatagtctggcaaaaagcagcagacgaagacagcttgaaagcaaaatagacaatttcacagacgctgaccttgttattatggaaagcgttgcagatggtattgtcaaatctaaggaagtgggggaaatgtaaaacctccacttttgtttataattgcagtgatattagaattgatactctgcaatatttttgaaatcattgttcaacacataatataccttatttttagcaacggaatatataaaagaaactctggttgcccaaagtccttcctgacgtactgacctaagtacatcaaaggcgttggaaatagagaagttttctccatatccttgcagtaaatcctttgccttttcatatctgttatccccagataaaacatatggattagtcaattctggttttaaaatggagtaatttgttattaaggaatatttttctttttccaagcgatacccaatccccggttcaataatgagaacacgcccatttctatccgaaaacatagcctgcatagtagtgtcaggtgcataagtaattttcttttttttcactatttccaatgaatcgtcaaaagagagattgccttttataaagttttctgtcaaatcagctattggatagcatgattcattaccgcaaaattgtgcattgtcatttccatgtacatacaacaatgtgccaacattcccatttctattgattccgtgaaaagagtggtacttattatcggacatttttatccctataaaaaaacggtctttttcggcaattacagtatgttcccattcagaaaggtcaatatcaaaattgaacccaacaatggtttcttttccattatacacaaatcttgtacacatatttgtatttcctttcgcaaactaatttaaatagtgtaaaaactaattacattagtaattttaaatattataagactgtttgtcaatacaagagttcattttttctaaccaaattattgacttcattaatttgattacttaaaatgaagtaaatgatgtgtagaaagaggaaaatgaatatgcgagttacaaaagccgaagttataaaaactgcttctgatatggctgatagaaatggacttcataatgtttctttgaaagctattgctgaaaatttagggattcgtaccccctccttatataatcatataggaagtttggatgaacttcttagggagatagcacatagtggtatgcgtactatgaatgaaaaaatgattcgtgcagcaatcggtaagacaggggattcagcattaaaattagtggcagttgaatatcttaattatatgattgaacatcccggtgtttatgaaataattcaatgggctagttggaatggaacagaggaaacagcaatcatttttaatgattatctatctttacttaaaacacttatttgctcatgtggctttaatccagataagaccactgaaattttgaacatggtaacaggtatgcttcatggttatacaactttacaattaagatatgctttttctaatcctgataaagtaagaaaagaattatccgaagcaattgacacactactattgggagctaatcaaaaatataaagactaatgataaattttaaaaagaaatattttataagagaaacgtgcaaatctcaaatgagaaatgcacgtttttctataactatttcacaatcttccagttttccccgttcttttccagcacaaggtcaaactgcgatacctgtgttgtcatggtctggttatccagatatttcactgcaagggaagctgtcacctgatttccgtttcgattgtaaactggattcaccagttccgagaaaatgtattctttccccacaggtttcagcacgccctcattcacataataggtcagctcctttgcggttgccgtagggtacagcttgaaaaaggtagtgagaaattcgttgatttcctccgtggttatggaatccaccgtaccgtcactttgtaccgcttttggcgtatagccggattttacgggaacgctggtgatggttggattctggataatcgtcagatttccagagccatccacatagaccgtcacctgataggcggaacggacggttttaccggattctccctctgtgatacgctgttccactgtataggtcacttgataatgctgctccttttcttctgtgatttcccatatctgaaaatcggtcagggcagacgatacggggatgtcctttcggacggtatctacattcagggcttgcagttctccggtgagatacccttttaaagcgtttgtccggctatcaatggaagcggcggactgttcccatgaatagtagacttctgcgaaattctccacaaagttttctatcttgtgggtgtcgaggattgtttccttaatcactttggtttcatggacagtatgaatgtctatcgctgtgaaattcttatagacggcaaacaggaagctcattgccagcagcacccacagggcaattacggtttttttgtgggtattgactttgtaaactttcagtttcttttctttctgctttttctggttatcctcttttctaatctgaatcatatcggttcatcctttcttattgtttgattcgtcgggctccggcaaggtgctgttgccagtaagagcctgtcaggtctgcataaccaatgggatttccggcatggtacatccggttatttcccacatacagccccacatgggtgatgtaggttccagcattgtaggtggagtggaaaaagaccaaatcccctgcttttgcttcggacagggggatgtgctgcgtcacattgtactgttcctgtgctgtccgtggcagggcgattcctgccttgccatagcaccactgcaccagtcccgaacagtcaaaggaagtggagggggaatcgcccccgtacacatacgtccagccctcatactttaaagcttcctctatgatagcctgcaccgtttcatcatcaaattgtgccacggtcaggtattgcgataccaagaggacatagaacatatttccataggaataccgccagcccccgtttttctctacggcaacaggggtggtgtaggtgactttctttccgccggatttgtcccttgagaagctctctgccagttcaaaggtgtattttttcccacgtcctgccacatagtctaggaaaccgccgccgtagttgtaggactgaatcacactgtttaagtcacagccctttgtttctgccgctgcgagcagttccgagaaatatttgcagccctgtttgatggattcctctgtactaagggagttcgggggaagccccagagattccgaggactgcataacgtcttccagcgtgccgccagattccacctgaatgatggcgagcagcacatttaagtattcctctatgccatattcccttgcatacttttccagcataggtttatgggcgaggacttcctgtgatatgctcacgcccccatagataaggttttcgctgcttcctccgtcttcctcatccgagaagacaatcaccaccaaaaggagcagggagaacatcatcacgaacacgccggaacaggcaaagaaaaggtgtcttaacttcatggcttctcccctttcttctgtttggacgccgctgttaccgtttttgtccactcctttctggcggtggtacgccggatggtaaagttggattcttttaccacaggggcagcccgttttctttctggtatcacaggagccgtatcattctggacaggtcttgccggacgggaagcagcaggtgtagtagttgtcttttgtctttcatctggtttgtctggggaagccggagggactatctggcgttctgtccttataggcggtgtctgttcatggtggatggaagccgcttttaccactggaaccgaagcccgttctgcaatagctctcccataaggaacctgtccccgttccctgatggatggggaagcaggctgcacagctggctttcctgtatgagaggtatctgcatgatgttggaaatcttccggctgctttgcagtaacagggcgttcatggacaggagctgcccctttgggtgcttcggaagctgacttttgcggctgttttacctgttccagttccgccctgcgttctgcaatggtctgtctgcggctttctgcctgtgcatttcgttgttccgctctggcagttcgggtctgggtcacgctggaagtaaaatcccttacgccctctgatacctgtgttttcccgtggtaaagggcgtactttgcattgacaggcaaatcctttgcctgctcccgaagctgtccggcagtatcggctatcttatctttggtatctgccgccgcacctaccgcagaaccagcccgtttccatacggattccttttccggtgctgcctgcccgtctggtctgctgtggtctgcctgtgtccgtttggaagaactagatgttgaagcagttctctggtctgagccagcttgttttcctgcgtggtatgcagccgttccagccccaagagccgccacagaacgtcccaacttatgctgtaaacggtgcatatgggcgtgcatgagcatacggggtcttcgcatgatacggctccccatgctttgggaatcgccgctctgtaaggagaacatccccatcaaatcccccagcttgaaatagattccggcaaaagtcactatctgcaagaacgccgtcaggaagaacggatattccccagacaggttgtagagcatggtggaaatgctgaacgctaccgtgataatcagggtgattccggctctggtaaggatggtgttgaacagtttcgtaatggcacgctttgacatcccctcaaaagagggaaccatgctaaggaggaagctcacaggcaggaacatggcgtaaatgataaaaagcacctgtgagaaaatcattatccccgtgagcaggaatacaaaaatggagataccgatattgaagataaataggaagaagacggttcccaagcggttgatggtctttgtgatggtaaggttggtgttttccctgtcttcgatttcctccaccacgatttcttccctgtcctgcccgttgttttcgtctgggctggttgagagcaggctttccacacggtcagccccaatgctttccacatccgagttgccgtattgcagcaggagccacggctgtttgacctgaatggaaaacaggctgtcccgtatcaaatccacactgtcttttccttgactttccgagtttggcagcacaatctttgtaccaagggtcaggctggcattgctgatgtctgcggaaaattcattgattttcccgatataatcaggggcataggcgataaaggaagcggacagcacgaacaccaccacgaagttcacaacggcatggatggcttttgtggtttcccgtttgataagccctgtgtaggcaacgtaaatccccaccaccagaatgagaatcagcaggaacccgacataaaatccctccgaggacaagccgctattggtaacgcctgcaagggtctgcatatttttcccaatggaatccgccgtagaggaaatgaaatccagtgagtaggcttcctgaatcagataccctgtggcgttggaaaggtacaagctgattgtccagataaaatttgtgatggcatacagcccgtacatcacctgttttccgataccgtccagccagttccacgggagccagtcccatccgctgtccacataaaaatcaagctggtagttgtccagaggatatttgctgtattcgttggcaacgtccaccgtatcatccaccagtccggcagcgtgggcggctgtgccgaagactgcaagcagcaggaggatgagcaggagtgccagaagcaccctgccaatcacttttcctgccgtcttccaagacaagcccttttttgtgtgatgaggaactgggaattgcggtcggttggaagttctatgtatcaccatcatttgttgtgataaactatagttgtaacattggtggctgataagatatactaacgattaggagtgatttattatgccacaagtttatgaaccagagtttaaaagaaagcttgtacgtcttcatttagaagaaggacgttcctacaaaagccttacccaggaatatggcgtgtctaaatccgccatttccaaatgggtcgaattattcagcaatgaatgccagaaaaaagtaaatgccgatccgacagcgttaaatgatgctgatcttatgaaggagaatcttcgccttcgcaaggaactggaagaagcacggaaagaaaatctttttctaaaaaaagcagcggcattctttgcaaaggagatcggttaacggcgtaccggtttattgaaaaatatcatcctgtttttggtgtccgatggctgctcaaaagactgtccatttatccaaatgcctattataactacctaaaacacaggaagtctgtttaccatgccagaaaatctcagataaaagatcagattcagtcgatctatcacgaacatgggggcgttgacggttatcgtcagatgaaagtttatttaaaacgccggaatatcaatctcagcgcattgaccgtacatagatatatgaataaagaaatgggattaaaatcgattgtccgccgcagaaagcctggatacacgaaagggcatccctataaattatttagaaatattcttgaacaggattttacatgcgatgaaatcaatacaaaatggtgtacagattttacctatctgtatctatcagatggaagcaagagatataactgtacaattatagatctgcatgacagaagtgttgtcgccagcataactgatcgaaatataacgtcagagcttgctatacgcacattgcgcaaagctatagagtcccagtctgaagtcaaaggagtacttattttacatagtgatcagggaagccaatatacttctaaagattttacagaatactgtaagcggatggcagtcacacaaagtatgagtaaagccggatatccatatgataatgcaccaatggaaaggtatttcaacacgttaaaaaatgaattgatctatcagcatgaataccagacagaagaagctttgtatacagcaatagaagaatttgcttacacaacgtataatcatagaagacctcattcttacaataactataaaaccccctttgaagcacgaaaaacagcatgatgccatttgaaaaaggggcatcgtcataataggatttttttagcccttagtgttacaaaaaagcttgaccacaacaattccacctcttttcttacgggcggtctggtatcaaaggcgtggaacaggtcttcaaagataggatggaactgtatcacgcccacacgcccgtacaaatcactgatgaggcactgtccgttttccaagtcacggagccgcttctggttgttttcatcttcggaatccactccgaaaaaggcgagggtctttttgatttcgttgatgtccgtggaacggaacgcaaacttcaagcccagattgtttttcagtttttcatccagcaaatcgtccgtgttctgggtgacaaaataaacgcctgcgttcatggcacgtccggcacgaaccagcttcatagaaagggtcttgccctgtgccacctgtaagaagctccatgcttcatccaaatccacaatcttgaacacgctgcggtcggtgtggatgaagtcgagggcaaaggtgctgattacaatgagcattgccacggaaagcagctccattgtggtgtattcttcaaatgaggtttccttatccggcagcaccaaatccgctacctgaatgatattgagctgcttttcaaggctgatggactgtgtgacatccccatccgaaaagagcaggtgtgcaaagtcatagtccgtaaaggattcgatatggtcggctatgctggtgctgatggtggttccctccgcccgtagttcctcaattactttgaaaagcccccgttcttcactgtttgttactgcacgaatagctttccgaagaacagggaacttctccccgtcacggctggaaatgccggttaaaaaggtcaggatgtcgattgccagtgattcagaatcctttgggttctccataatcacatacgggtcaagtaagcccctgttctgttcctccgaagtcaggtttacgatattgatttcatgggcgatttccggcagggtttctttccagcgtccccgttccgcttttgggtcaacaatgagagcctgtgccccaaataatacggaataatagacaatcatgttgttactgaatgattttccaccgccgagggagccgacaaaagcggcagcaagggcgttggtgacggagccttttaccccttgactggcaagggcaggctttaagtacacgtttcttcctgtatcaaggctgtacccgatataaatgccctccggctcccccaacatctgggttgccccgaagccaagaccagcgaggaagtcactggtgacatactggatgtaatcgttcagataccgtttgctggcagggagaaattccccatgcagccccagcatatccccaaaggggcgaaccagcttcacgttcaaatcgtcataaaaatctttcacctcattacagcggcgtttcagttcttccaagtcgggagccgtcacacgcaccacataggacagcttatacatggattccttgctctggtctaaggtggattccaactcattcacgctgtctaaagcgtccaccacgtttgtactggtttcactgtcattctgccatgcgtgattgtccaaatctttcagctcttttttcttgttccgcaccgtagagagggctttccggtttgtgacaatctccacattcatagaggtatcaatgggaaaggtaaattgctgctgctgatagtaaaagatttccgaggatgggaagtccagttcccccacaatgctgttgatagtaaagtaggcggcataaactgtcccgtcttcctgttcgattttcagataccgctggttttcctctatcagacaacgggtgggtttgatgaggtcatagtatttcaccagcgtttcttcctgaaaccgcttctttggcaggtaatactcataatcttcgtaggcggttccggtctgcccgtataaatgctcaatcagataaccaaaatcgtctttatccagccgccggactttaaagcggcgtgagattttactttccagcagtttttccatcttctgaaaccgccagatttcttcattgctcatggaaacaaaatcccccatgagcttgtggttgacttcatggaggaagtcggaaacagcggtctttgcttccctgcgaaactgtttcatggtgacttcctgctcattgacaagcagcttgaagccgataaaaaagcggtagtccacctgattttcccctatcatggaaattagggcttcggtctgtgcgtcaatctttgcacaggcaacgtcctttaacttgcccgtcacttcctgtttggagcgttcctgtgccgcccgtatgctggattccgtgctgatttgcagggcgtgaatctttccgtccctgttctgggcgataagctgacggaaggaatcgtgtacctgatatttctgttcggggcttaaaaaggaatagttgtagggaagcagctcatagtaagcgaagcactccccgtcatggttgaacacaaggttattttcgatatacttaatcggatatgccataaatatcactccttactgccgtgataggctgtgccggatattccttttccagcttcacgggctttcctgcataggtcagttttgggcgtaccagatatgccagtacggatttcaggaagccgtaaggcttcttcccatcaaaagtcttctggcacatgaaccaagtgagggcaaagggtacgccaaaatattttaaaaatgctccgtcaatgaacgaaaggggagggaggttccccaagagcataactgcaaacaccgacaccacgaaccacgccatctgtgtgaacgtgatgggtaatggcagcttaaaatcattgatggaatagagtaccttttccaccgaccagatactggtatagcttcgtattttcttcatagtgtctgtcctttctaaaagatggggcagcaaaagccgcccctgaaataaaaaagccgcctgtacttccaaaaagagatacagacgggtctatcgtatgatttcatatacgccgtggttcgtgacaataaaggttccctccaattccatgtcacgcccataggctgcatagtcgatatagttttgtaagtgtgccggaagttcgccaagctgtccgctttcttccagatagtagcgagccacatccgccatatcgtcacagccagaatgacagataatatcgtcttcatgctcacagagttcttcgatactgccaaagtaggattgcagctctgatagttcctcctgaatatattccggtaagtcctccaccatttcacacaggcggttgacttcctcaatgggggtatattcgtcaatctcaaagggcagctcataatcatggatggcgtattcctcatattcatcattcaaaccgatagttaagtgtttacttgagaatttcattaagaacaaagcagagacaggcacgcttgacatactagcgtattcttgttattaaataaacaacgacttaaccacaaaatctgctgttaagccgtgacaaatattatagaagatttaaacaagaggagagacggagatgcggatgaagcagtagaagcttttatcaatgaaacactggagtataatccggatgtgaaatgttctcatcacgagcacagccacggggaaggacatacatgtggcgagcatggatgtggaagccatagctgtcattaagaaaaatagcaaaaaataataatacaaaagaatgtgtcaaggtaatggagaaaggcaactgttgacttttgccttttagcgtgttaaaatcgagagtgtagaaaaacaaagacgttttgcagtcattattgcaaagcgtctttttattttatcagcagtgataaagagtgtgcggtaaacagataatacagaaaaggaagaatgccttatgaaagaattgttatttttgcttgtattgtttgtttctaatgttattcaggctatcacagggtttgccggtacggtattggcgatgccgccctccgtttatttgcttgggctggatcatgcaaaggtggtcctgaatgttatggcctggctgtccggactgatgatcgcagtgaccggatatcgacatataaactggaaagaattgcttaagatgtctgcggtcatgttggttggaatgtttgcagggatacagatctgccggatcgtgaaatctgaaaatattcttctgacaatatatggaatcataatcgtcgtagttgcattaaagaatctgtgcatccatacagagaaaaaacttccggatctcattttgtggatagttctgatcctggcagggataattcatggtatgtttgtatcaggaggggctttacttgtgatctatgcaacacaggtactgaaagaaaaagaagaatttcgtgcgacagtggcccctgtatgggtggtgctgaatttttttctgatggttacccagttcaggagcggcctggttggaacggcagatattcgactgatctgtatcagtatcctgccattacttatagctacatggttaggtaaaaagctggtatgtaaagtatctcagaaggtatttctgaatttgacttatatactgcttctgatatctggagtatctttgatcgtctgatgcagttgatcacaggaaactgcggtgtagaaaggtgtataaatatggcagtaacattgcgtgaaatcataaaacaggtacagcatctggagatgaagctggtagcaggtgcgacaggactggatcatgaagtgtcatggactcatatggtagacagcgacacgatttctgcatttctgcagggacaggagcttacttttacaactggattaggattgaatgaaaatctgactcttcttcgtctggtaaaggaagtatggcgaaacaaagccagtgggatcgtgatcaatacagggccttatatcagtgagatcggacaggatgttattgattttgcaaatgaaaagggattcccggtatttgaagtaccgtggagggttcgaatggctgaaatcatgcggatcatatgttttgcaataacaaaagagcagcagaacgcaattgaggttgcgacggcactgaacaatgcctttttatgtccgtcccaggaagaactgtatgtttcggcactgatgagaaaagggtattttacagacagtgcatatacggttgtgaatgtgtgtgttctggaagacaatgatcgtgtaacaggaacaaggctagagcagattttatctaaactgagcagtcatatccgctgtaattataatgggattttgtgttgcgcccaggataagcagatccttctggttttgtgtgattattctgatgaagcatgcagaaaaactacagagaggatttttcagatactatgcaggatggtatgtcagaaggaacagatttttgtaagtgtaagtaagcagatttccgggatcaggcagatttataagagctatcagtttgcggaaaaaatgtctgatctattatgtgtctgtcaggttccgggcgagcaaagcacagatggcggaaagattattttttacaaagatcttgggatttacagggtactgctcacacttacagataaggaagcaataaaagaatatctggcagatacagtagctccattgtatgaatatgatgagatgaaccactcagatctggtcagagtacttcagtgctacctggctaacgactgcagtgtcaaaagtgcgtcacaggaattgatcgtacatcgaaatacaattaattataagcttggaaaggccgctgagatacttggaaaaaatctttctgattttgatgtgcgttttcagctgaggctgggtttcctgttatatcagatgaatgaaatgtaaaaggaaaatgcggcagcagaataataatgattgtgctgcagcacaaaaataattggatagatgtctattgcagacagccagtgtcgagagtaatatatgactcagataagacaaaggcgtctggttcacaaatgaatgtgggccgggcgcttttcttattctacaacaaataataagtttgtttaccgcaaaaatgaacaatatttaaaactgaattacagataaagaggaggaagttattatgagtttaacaggaaaagaagtagcacagatgcacaaagattatgtgatgcagtcatgggcaagatcaggagcagatactttaccggtagaaagagccgaaggaatttatttttacgattatgatggaaaaaaatatgcagatatggcttcacttctggtgtgttccaacctcggacatgagcttccggagatcgttgaagcgatcaaggaacaggctgataagatgtgcttcatggcaccggcatatgcatccgagcctaagagcatgctggcaaaaatgcttgtagaagcagcaggagcagatacatacaagagagttttcttcacaaatggtggagcagaatccaatgagaatgctataaaaatggcacgtatggtaaccggaagaaccaagatcttttcctgctacagaagctatcatggagctacacttggagcatccaatgcttctggtgactggagaagatatgcagcagagatcggtggtgcaaatgggttcgtacactttatgaaccctcagatgtatcgtgacggatatacaaaaggagttgatgatgcagaggtaacgaaaaaatatctggatgcgctggatctgcagctcagatatgaaggccccggaaatgtggcagcgatcctgatggagtctatagtaggtgcaaacggtgtcattcttcctccagacggatatatggaaggtgttcgagcactttgtgacaaatatggaatccttctgatctgtgatgaggttatggcaggattttaccgtacaggaaaaatgtttgcatttatgaatttcgacatgaaaccggatatcattacatttgcaaaaggtgttacctgtggttatgtacagctgggcggatgtattgtaagtaaaaaggttgcggagtattttgaggaaaatgttcttcagtgcggacttacttacagtggacatacacttgcatgtgcggctggtgtagcagcaatgaaatattataaagaacacgacatcgagggccatgtagctgagatgcacgagatcgttgctccgtttatggatgagatggtaaagaagcataaatgtattggtgaagcaagatgtatcggtttgttcggtgcacttgaagtagtcaagaataaagaaaccagagaaccgatgcaggaatacggcgtacccggaccggtaatgccgtggatatttgcagaattaaagaaacgtggctttgcaaccttcggacgtgagaactttattgaaatctgtccgccactgatcatcacgaaagaggagctggaagagtatctcccgatccttgatgaagtgcttacaatggtcgatgaaaaattttgtgactgataaagcaggaggtagcctatgaactgggattatctacagccggtaaaaattcatttcggcaaaggcagagtaaaagaaatcaaagaaatagccagagagcttggctgcgaaagaggccttctggtggcaggaccgtttttctttaaaagcggtcttgccgaaaaggtcataaaagagtcagaaggaatgatcgttgcttcttttggagatgtttctccaaacccggacgttgtagaggtagatgcctgtgcggaagtgatccggcagaaaaatatcggatttgtggtagcactgggtggaggcagtcccatggattgtgccaaagcagctgccagtgtagctctgacttcggattccatccgtaagtatcatggaaccggagtagcaatgccggagaaacatcttccactgatcgcagttcctacgactgcaggaacaggaagtgaagtgacctgtgtatcagttctttcggatcatgcaaatggaaaaaaagcgccgatcgtatcagagggattttatccggcagcagctatcattgatccggaacttacttatacaatgccaccgcaggttacggcaggaacaggaattgatgttctttcccatgcgatcgaaggctattggagcaaaggtcatcagccgatctgtgatgtacttgcgatgcatgcagcagaactggtatttaaatatgtttacagagcatacaggaagcccgatgatgaggaagcaagggagaaaatgtgcgaagcatctttgatcgcaggattggcgtttactttaccgaaaactacttcgtcccatgcgtgttcatttccattgaccaatatttatcacatcccgcatggcgaggcgtgtggcctgaccctggattattttataagaatcaatgcaaaaggcgaaggtggtgaacgtgtagaggaatttgccagaaggattggattcaaagatgcagaagagatggcggatgcagttcttgaattaaagaaaaaaatgggattgcggtgtgatctgaaggatctggagcttgatgatgatcagattgcggagctggttcgcatcagcagacacccgaacctttataacaatccggtagagatcacagacgagatgctggatgagatgtatcgatatctggccggaaagtgaaagattttgattgaatattgaaaaaaataatgataatatagagagagacgatggagtccggatactttggtatctgggctctttttgtatttatggatgggagatgaaggattatgaaactgatcacagcaatcgtaagacctgagaaagtgatggacgtcatcaaagcactggagcaggaaggatattttgctttttcaaaatgggcaatttcaggaagaggtaaggaaaagggaattcaggtaggggatgtcctttatcaggaaatggcaaaaaacatgctgtatattactgttggggacaaagaaaaagatgaggttgtagatattatcattaacagtgcaaagagtgggcagtatggacattatggtgatggaaaaatttttgtttccgatatcagtgaggcatatacgatcagtgaagaaaccagagaagatgatgatgaatgatatgattgatgaagcaggaggatatatatgggtgaaagaaataaaagaacaaaattaaaaaaatccatgggacctggttcgatctgggcagttgcagtcggttccatcattggatggggatgttttatacagggtggtctctggacagaacgtgcaggtggaccgctcccactgtttctgggatttctggcaggcggtcttttaatgatcgtggtaggctacagctattcttatatgatcgcaaaattcccggtagcgggtggtgaatttgcctatgcatataaaggctttggaagaactgcttcgtacatatgcggatggatgctgtcgcttggatatctgtctattgtagctttgaatgcaacggcacttccggtattggcatcctatatttttcctggagtctttaacagaggttacctgtatacaattgcaggatatgatgtatatatgggtgaagtcggattatccctgttctttatcatacttttcgggatcatgaattacaaaggtgcgaaatctgtaggaaatcttcagcttgcgatggtccttatcatgtgtgcagcggttgttgtatcagtcattggtgtgatcgcaacaggacattttgatgcttcaaatctgcagccggcatacggagccgaaggcaagtctcttggaagcggttttgtatctatcctggcattggctccgttcctttatgtaggatttgactgtattccacaggcggcagaagaatatgattttccaccacagaagtgcaaaatgctgatcatttcagcattgatcgtaggtgctttgatctatggtgcaatggcactggtgacagattgtgttgttccctggcagcaggttctgactatgacagatgcgaatggaactcttgtaaaatggcatacaggtgcagttcttgatcttgcaatgggaaaaattggtgtgtgctttgtggcactggcagtgtgcatgggaatttttaccggtatgaacggattttttatgacatccagccgtcttttatttggtatggcaagagcaaaaatgcttccgtcagcttttgaaaaggttcatccggagcataaaactccgtccatatgtgttgggtttaccatggtcatctgctgtatctgcccatttttcggcagagaagtgatcggctgggttgtagatatgtgttccgtaggtactgcgttcggatatttctttacctgtgcaggtgcttatattcttctgaaaaaatatggcgatgatacagatacaaataaaatccatccggcagtagcaatgggcggctgtgtgatctctgttgtaatattgctgctcctgatcgtgcccggttctccagcattcatggctccacagtcctttgcagcactgatcgtgtgggtgttgatgggagttacattctattttgtttcaaagaaaaattttgcgaaagtcactaagagagaaatggattatctgattcttggaaatgtgcaggtagttcgaggactgagaaaaggaaaagatcagggaagagttgtacagggaaatattgtggctgatcagagtaataaatcttaaaaggtaataaaacggctacaggcctataatactttcagggtaacagaaaaacttccattcaaaaaatgggagtttttctgttaccggagtatcatatttgcaaggtgtgatttataaagtatcttgacagaggtaccgatcctgttatactattaaaactgataaaggggagtaacctacgtttggaaatctgcgtttgcagtgtcgtcagtacggtggaaacatccggcgctgcagggaaatggtgagacttttattgcattttttgttgtgcaataagggtttctttttttatatccttttatcaaaaaaatcctttattgcataaaaaaattacagttggtgaatatttgcaaaaaaggaggcaaaggtaatgaaagaaatttatcagcagacagcagaagaagttctcgagcgtgtgaaaagcagggaatcagggcttaccgatgaacaggtcagacggtccagagagaagtgcggatggaatgagcttgcagaaggaaagaaaaaaagtatgtttcagatcttctttgaacagtataaggattttctggtgctgatcctgatcgcatcggcagtgatatccggtatgcttggagatgtggaaagtgcagcagttattgtgatcgttattacgatcaatgcgattttgggaactgtgcagacagtaaaggctgagcagtccctgcagagcttaaagaagctttccggaccggaggcaaaggtattacgtgatggtgtggcggtacagctcccggcaagagaactggttgtaggagatgtgatccttcttgaagcaggtgatatgatcccggccgatggaagattgattgaaaatgcaagtcttaaggtcgatgaaagtgcccttaccggggaaagccttgcggttgaaaagagtatggacactattttggaagaagcaccgcttggtgatcggacaaatatgctgttttccggaagttttgtcacatatgggcgtggcagagcagttgtaacgaatgtaggaatgcagacagaggttggaaagattgcgggacttctgaaatcgacttcggaaaaacagacgccacttcaggcgaatctggatgattttggaaagaagctttctattctgatcctgatattttgcggaattctgtttgcgatcagtgtattccgcggtgagaagatcagcagtgcatttatgtttgcagtagcacttgcagtcgcagcgattccggaagctttaagctccatcgtgacgatcgtcctttctttcggaacacagaagatggcaaaggagcacgcgatcattcgtaagctccaggcggtggaaggtcttggaagcgtttctgttatctgttcagataagaccggaacactcacacagaacaaaatgacagtagaagattattatattgatggaaaaagaatcacagcagatgcaattgatgtagcagatccggcgcagagatgtcttttggactacagcattttatgtaatgattcaacaaatgaaaatggagtggagatcggagatccgacggaaacggcattgatcaatctgggcagccggtacggaatcgaggctgctggtgtaagaaagctttatccaagggaaggagagcttccctttgacagtgaccgtaagatgatgtcaacacttcacagaattgatgatgaaaaccggatgatcgtaaaaggtgcggttgaccggcttctggagctgacagacaggatctggacaaaggacggagttcgggaaatcacagaagcagataaagaaaagatccggcgccagaatcaggaattttcaatggaagggttacgggtactggcatttacctatcgtgaaattccggagaagcatgtattgacgatagaagatgagaaccatctggtatttcttggcctgatcgctatgatggatccgccgagggaagaatcaaaggctgcagttgcagaatgcataaaagcggggattcggccggtcatgatcacgggagatcataagatcacagcagcggcaatcgcaaaaaggatcgggatcctacatgatctgtcagaggcctgcgaaggtgctgatattgaaaatatgagtgatgagcagctgaaggagtttgtcccgaatatttctgtgtatgcaagagtgtcaccggagcacaagatccgtattgtccgtgcatggcaggagaaggggatgatcgtggcaatgaccggagacggtgtgaatgatgctccggcattgaagcaggcagacattggtgttgcaatgggagtgaccggaaccgaggtcgcaaaggatgccgcagcaatggtgcttacagatgataattttgcaacaattgtaaaagcagtggaaaacggacgaaatttatatcagaatatcaagtatgcgatccagtttcttctgtccggaaactttggtgcgatcctggcagttctttgtgcatcccttgcaggacttccggttccttttgcaccggtacatctgctgtttatcaatcttttgacagacagtcttccggcgatcgcgttaggcgtggagccgcacagcagtgaggtgatgaatgagaaaccaagatcagcagacgagtcaatactgacaaaggattttcttggtaaaatcggtctggaaggactggtgatcggtatgatgacgatgataggatttttgacaggatatcatcagaatggtgcactgcttggcagtacttatgccttcggaacactttgtctggcacgtctgttccatggattcaactgcaaatcggatcatccggttatctttacaaaacgtttctttaataataaatggcttcagggagcatttgtacttggggcagtactcattaccgttgtactgacggttccgggatttcatctcctgtttaaagtagagacgttggatctgatgcagcttggctgtgtatatctgtatgcgtttgcaagtcttccgatcattcagctgcttaaatggatacgcatgaaattaagaaaaagaggagaatgatagtggatataagtaaaatatctgtaaaaaaaatccgggagcttattgtgtttacaacatttcttgtggtcgctctgtggaagtttgatgtagtactcgatgtgctgaaagcaatatgggggattgtatttccctttgtacttggcggagcgatcgcatttgtgaccaacgtgccaatgagctttttggaaaagaaaatttttggaagggtaaaaaaagaaaataagataggtgcaaaattggcaagaccgataagtctgttccttacgatcgtatttgcggttggtgtgatcgtactggtgatgtttggtgtgatcccgcagcttacgcggacaatgggaactctgatgatgagtatcgctgattttattccgcagatgcaaagctggatccgggaattctcccataataaccaggaaatcatgaagctggtagatcaggtacagtttaatccggaccaggcgatcaagtgggggataagccttcttggaaacggtgcaggaaatatgatgaataccacaatgtcagcagtgggttccgtagtcagtggattggcaaccttttttattgctttttcatttgcctgctatgtcctttttcagaaggagaagctgcatgtgcagatccgaaaagtattttttgcctttctcccaaagcaaaaggcagatgcttttcttaaagtctgttctctgacttatcggacatttgcaaattttcttgcaggtcagtgtctggaagctgtgatcctcggctgtatgtttgttgtgatactgagtattttgaggatgccatatgcacttttgatcggagttttgattgcgtttaccgcattgattccgattttcggggccttcatcgggtgtgcggtgggaagctttttgatctttatggtaaatccgaaacaggcaattttatttattatagtatttctggtgctgcagcagatcgagggaaatctgatctatcctcatgttgtgggtgaatccgtaggacttccgtcgatctgggttcttgcagcagttacgatcggcggaaaccttatgggaattgtaggtatgcttgttttcattccgctgctttccgtgttctatactatctttcgggaattcgtatatctgcgcctgaaaaaaaagcatatcaaacaggtgacaaagacagaaatagaggaatatacggcggaggaaattgtaaatagtgacatatcagaggggaaatgatatgatggacttgtattgggatagttaagaaaatcttatatttaaggggggagttactatgtggtttgtgtttgccttgctgtctgctgtatttgcggcgctgacctccatactggccaagataggtattgccggtgttaattcgaatcttgcaacagcgattcgaacgatggtggtgctagttatggcgtggggaatggttttcctcacaaatacccagggcgggatcgcagcgatcagcaaaaaaagctggctgtttctgaccctttcaggtttggcaacgggtgcttcgtggttatgctattatcgtgccctgcagataggcgatgcatcgaaggttgtgccgatagacaagctgagtgtcgtgatcacactggtactggcatttgtttttttgcatgagaaatttacagcaaaatcgatgatgggatgtattttgatcggtgtgggaacattattgatggttttgtaaaaatgcataagaaaactatatacaaaaggagagtgttatgaaaacacgaaagaaaatttcagcaaagctgctggcgatcatgcttattgctgcattgctgcttcctcttgcatggaatgttccggtggaagcagccgcggcaaaacagattgatgttttgttcagccatgatacacattcgcatttgaacagcttttcaaccatcgtagatggagagcaaaaagaagttggcggatttgcaaggatcaaaaccctgatcgatgaaaagaagcaggaagatccggacaccctggtgctggatggcggcgatttttccatgggaaccctgatccagaccgtatacgaaacggaggcggcagagcttcggatgctgggatatctggggtatgatgtgacgactctggggaatcatgaatatgattatcgttcaaagggactggcaaatatgctggaggctgcgaaggcttccggtgagacagtgccggcactggtagtgtgcaacgtggactgggacagcatggagcaggatggattaagcgatggtcagaagcagatccggtcggcatttgaagcctacggtgtgaaggattatgtagtagttcaaaaaggagatgtaaaggctgcggtagtcggtgtgttcggtaaggatgccctggaatgtgcaccgacctgtgaattaaagttcaaggatccggttgaggccgtaaaacagacggtagaagagatccgaaaaaatgaaaaagtggatatgatcgcttgtgtgtcccatggaggaacctgggaggatgagaacaaatcggaggatgagatccttgcaaaagaggtgccggatatcgacttgatcatcagcggacatacgcattcagagctgaaagaggcaattcagcatgggaacacatatatcgtatcctgcggtgaatacggaagaaatctgggatcactttccatgacacagaagcaggacggacggtgggagctgacatcctatgagctgatccctgtttctgaggatgtaaaaccggaccaggcgacacaggaacagatcgatgccctgatggatacggtagataagaattatcttgccgatttcggctatacaagggaagaggttcttgctgaaaatgatgttgaattcaacagtctggaagaaatgggcacgaagcatgaagagttgaatcttggtgatatcatgtccgatgcatacatatatgcagtggaaaattccgagtattatgatggtgatccggttgatgtagccgttgttccaagcggaaccgtgcgggatacatacacaaagggcgatatcacagtagaggatgtttttaattccttttcactggggatcggaaaggacggtgttgccggatatccgctgatcagtgcatacctgaccggaaaagagctgaagctggcagcggaggtggacgcttctgtatcggattttatgacaacggcaaggttatattgcagtggattgaattttgcatacaatccacatcggatgatcctgaataaggtgacagattgttatctcaccagggcagacggagagcggatcgagatccaggatgacaagctgtatcatgttgtgacagatctgtataccggccagatgcttggttctgtgatgaaaatgtcctatggactgctgtctcttgaaccgaaggacagggatgggaatcctattgaaaatctggaagatcaggcgatcatggaggatgacagggaattaaaggcctgggatgcgatcgcaagatatatgcagtcctttgcggatacagacggcgacggaattgccaatgtgccggaatattatgagacgacacatggacgtaaggttgtggaggacagcagaaatatcattgatctggtgaagcagccgaataagttttcggcaatgatcgcaggtatttgtttgatctttattgtgatcattgtgcttgtggtatttctgatccgaaggatgatccgcaggatcaaagtcagaaaaggaaagagaaattcaaaataaatatacggctgagatcgttaaagtccgtaagtcgacgaaatcccacgtgtcctcttctctgaaaaatctggagagcagaggtctgattgaaaggatacagagtgcggataataagaagcatatcgagatcgttttattaaataaggcagatcggatcattgaagatggaataaaagcacagaaggaatttgcaaaaatcgctttggacggcctgacagtggaagcaatgatctggatctctgcgatcatcatttcctttggatgctatcttccggtaaccttattcagcaaaacaaagcccaaggtcggattactgatgatcccaaagacctgtgcatatatgtggatcattgcagtgggacttcagcttctgttttaggacagcaagtattaagtaaccgcctgactatggatcagacattggatgtccgcagcgtattttggtacgtctgcggacacctttttttgagatgaattgcaatttcttttgtaaaattgtagaatgaaagagcttatgaaaaagagtcatgaaagagagaatcgggaaatgaatgataaaatcgcagtctgtcttggaaagggcggacagagagatatggcggaagccttttgcaggaggactggagcgcagcttcaggataagccgggagattttctgacggtgcggtttgattccaggggcgtttcgctgtccggtttcgggctgacctatcagggggattttgtggagacgatgcttcacagagttaccagaggcagacttcagcatgagatgctggtgaaggcggtgaagtcagataaggagggaaggaaggccatcgatgctacggcaggaatgggtgaggatgcctttcttctggcagcccagggctatgaggtgacgctgtacgagcagaatccggtgatcgcagcccttcttaaagatgccattcgccgtgccaagaaaaatatggatctgaaagatattgccggtcgtatgaaggtgatcgagggaaacagtgtagaaggtatgtcaaagcttcttgatcctgtagacgtgatctatctggatcccatgtttccggcaagacagaaatccagcctgatcaacaagaaacttcaattgatccagaagctggaaccaccgtgttccggggaaaaggatctttttgatgcagctatcagagcaaatccggataagatcatcgtcaagcgtccgctgaaaagtgaatgtcttgccggccgggagccgtcttatacattgaaggggaaggcaatacgatatgactgctatgtattataaagtcagacattatcaatacaaaaatcgaatcggaaatcttaagtctgaagctgtaggcgtggtaagcggggaaaaacatttccccatatttcctggaaatatgattttcaagccactgacgaaatccaaaccattttccacgccactatatgcttatgcagaggtgttctggtcaacgatcattaatgaatattttatgcctgcgcccaggtatgaactggccatctgtgaagggtatgaggcagtaaatgaaaaatatcttgactacggaacggcagtacccatggcctataaagaaggggaatcccttttgaatcttctggagtttttcaggaaatatccggatgaaaaggtagatatagataattatgtaaactattgccagatgttttatgattacagagatatttttgaagctgattttttgcaggagcatcaggaaatggcggaacagcttgccatgcaggtactgatctctgtcctgaagggagaccagaattatcattatgaaaatgtagcatttctctgtgataaagatggcgggatcataagtcttgcacctatgatcgatcatgaattttccacgtattttatgtttccggacgatatttcccgtcatgtatactggctgatggaattaagcaaatccatccgcggatgggaagtccggcctggggaatatgataatttcaaagatccggaagaacggaaactaatggaaaaaagtgccacctgtattcataaaaatctcctctatataaaagaacattatccgcagacaacggaagaatttctggataaagcagaaaaactgaaaacagcattgacggaagcttcagaggattttctgatccggggaaatacggaatatccggactgtgcggattccagtgcctggctgatcggaaaagcccgatacaaggataaagatgaagagaaagccagcgcttatgaggcggaattatacggaaaggggaaaaagcttgatttccgggacgtaagtatcagtgcaataaatgaaataaaagctgtgatcagtcagatggaagaagttttgagaaagagagaataaacaaatggaacgaacaaaaacaatattaaaaaaaacctgggtggtggcagcacttgcctgcgtctgctgtctcctctgggggagtgcgatcccgctgatcaagacaggataccgtctgatgcagatggattctgcagatacggcaagtcagatcgtttttgcaggtgtgcgttttgcactggcaggaatccttgtactgatctttgcatctttgcgtgagcgcaaggtactgatcccggatcgaactgttctgaaatatgcggtgccggtatgtatggctcagacggtatgtcagtatttcttcttttatataggtgtggcacatacctccggtgtaaaaggcgctattatcacaggtcttgggaattttattgcgatcctgctgtcctgccttgtttttcacaaggaaaaaatgaccgggcgaaagatgctcggctgtatcctcggttttgccggcgtggtcgtgatcaatctcatgggaaattctctggatgcaggttttaggcttacaggagaaggatttattctgatcgcgcagttttcttacggaatgtccacggtgctgatcaatattttttccagaaaggtatctccggtggtactcagcggaacgcagtttaccatgggcgggatcattctgtttctgatcggaaaagggatgggaggacatttcggagtggtaaatgccgccggtatcgggattatcttttatctggcaatggtgtctgcggtggcctatacactgtggtcagtgctgcttgcctggaatgatgtatccagggtggcgatctttggctttgtaaatcctttgttcagtgtgatcctgtctgcactggttctgggagaggtacgtcaggcatttaatatgggaagtctcatcgcactgtttcttgtctgtgtgggaatttatgtggtaaatcaaaaaaaatcttcataagtggtattacagttattgttcccaggcaatattttttgaaacgtgttgctgagaacggagtgaacagtaacggtcgcagaatgaacagtaacgatgccggagttttgaaattgatttcaatacggcattgtgttaaaatagctccataaaaagtgtgaacataaaaatccatgccggaataactgcaggatccggaagcagatcctgcaccggacagtaaggaggaaaaatatggaatttcagaaactgatcgaagagagaaggaccatccgtaaatacagcccggagagcaggatcacaaaagaagatcttcttgcagtgatccgggccgctcaggaagcacccagctggaaaaactcccagaccggaagatattactgtgtaatgtccgaagagatggtggagaaggtcagcagagaatgtctgccggaaatgaaccaggcaaaagcagagaatgcctccctgatcgttacaacctttgtacataaccatgccggatttcagaaagacggaacaccggataatgagcttggaaacggctggggctgctatgatctgggacttcagaacgagaatctgatcctgaaggcaaaggagcttggatatggaaccctgatcatgggacttcgtgccggagacaagctccgtgagatcctttccattccggaaacagaaacggtaatggcagtgatcgccatcggaaaagcagccgaagagcctgcaagaccgaaacgtaaagatgtggaagatattgtgagattttattaaataatagaagaaatgcccggtacatatcaaaatgttcgggcattttttaatggaaattaaagagcaaaatggtctgaaaaggattgcctggaggagtgaattctgttatcctgtaagaaaacagctgtgacaacatggaagggttttgaaaagcagagtttgggagaagcaaaaaagcaatacagtaaaagcaagggaggtttttaaccaatatgcagatcatacatgaaaatgaatacgaagaaaccatgaaaaatatcgtaacgccatatcttctgtctcacagaagggaactttatgtaccgggtgcggattatccgtttcgtaacgaaagcaaacgaatcacaggtaagatccatatgctgcagtatctgtctgatattgatatgcctaaaggtgtggtagtcatcagccacggattcacagaatcagcagtaaaatatgatgaagtggcctattattttcttaaggaaggctatcatgtatatattccggagcattgcggtcatggccgcagctatcgtcttaccgcagacccgtctctggtccacatcgatacatggagaagatatatccgcgattttctgaaagcatgccgctacataaagaaagcacatccggatctgtcacttaacttgtatgcacattccatgggtggtgccatcggtggtattgctacagcctgggagccggactggtttcacaaggtgatcctttcttctccgatgatccgtcctcttacagataatgttccgtggccggcagccaccggcatagctctggagaaatgcattttcggaaaagatgaggaatatgtagctggccgaaagccttacgatggcagcggttcttttgagacaagctccgcaacatcaaaaccaagatacgagcgatacaaaaatctccgtgcagaacataaggagctccagacctggtctccatcctacggctggctctgggcttctgcggaaatgagctggtatctgcgtctctacggatggaaaaaatatacggcaccaatgctgctcatccaggcccagacggaagatctggtgtctgtccgtgccttgaaaaattttgccggaaagatcaatcgccagggaaaaacaagctgtgattatatccatatgatcggaacaaagcatgagatctatggaagcagaggtaagatcctggagaaatactggggatatatatttacattcctggacgatacggaaaatgatattgatcacagataagtatttttactacatgtgtatcacatatttaacaacaggattggtagcttttattcacttcctttctttatcatagtaaaattataaagcttttctcttatacattcgacaaaaaatgtgatataatctaacgaatcgtctttttgtacagacaaacgtacaatccaaaaagacaaaattaaataagggaaggattatagaatgttatctgttattgaatcagtgaatgctgccgtaaacaattttatctggggcgttcctgcgatgatctgtattattggtgtaggtctttatttaagtatccgcacgaattttctccagattcagaaatttccctatgccatcagggtcactatcggacgtatgcttcggaaaagagaagcttccgatggaagtctgacaccgtttcaggctgtttgtacggcgttagctgctaccgtgggaacgggaaatattgcaggtgtggcaggtgctattgccatcggaggaccgggagccgtattctggatgtggatttccgcacttcttggaatgtgtacaaagttttcagaagtaacacttgcggtacatttccgcgaaaccaatgccaacggagatctggttggaggaccaatgtattacattaagaatggtctaaaaaaacactggcactggctggcatatctgttttccgcttttggtgtgcttactgttttcggaaccggaaatgcaacccaggttaataccattacaacagctattgattctgcactgatcaattacaatgtgatcgctgcagacaatacttctacggtaaaccttgttatggggatcatccttgcgattcttgtggcaatgatcctgcttggcggaatcaaaaggatcggccaggttacagaaaagctggtaccgtttatggcattgttttatattattcttgccgtcggtgtagttatcatcaactggaaaaatgttccgggtgttttcagcgctatcatcagaggggcatttaatccggcatctgtgacaggcggcgtagtaggaagctttttcatgagtatgaaaaaaggtgtttccagaggtattttttccaatgaggcaggtcttggtaccggttccatcgcacatgcctgtgcagacaccagaaaacctgtaaaacagggatttttcgggatctttgaggtattcacggacacgatcgtgatctgtacgctgacagcgcttgtcatcctctgcagcggggtgccggttggttatggcgcagcagcgggagcggagcttaccattagcggttttaccagtacatacggaaactgggtttccatctttacagcagttgccatgtgctgcttcgcattttccactatcattggatggggactttacggagccagatgtgcggagttcctttttaaggaaaaagctatcagaccttttatggtactgtactctctggtagcgatcatcggagcaactgttgaccttggacttctctggagtatcgcagagaccttcaacggtctgatggcgatccctaacctgatcgcagtattcctgctttccggtgtggttgtaaagcttgtgaaggagtacttcgccggagaaggaaagaacgcctgaaggagtttttgaaaaaaaaacttgactatcaaaacaaacagagttagaattggtttaactcattaaagagttaacacataacagaagtaaattccatgaagggaatcagtaaagacagaggaaccgtcttcagagagctgtgactggtgtgatgcagcgtcggaactgccttgaatatcatccctgagaaggaaagccgaaagtttcagacaagtaagtaggttttcacgggtgcttcccgttacagaagtcgcgtatgccggtacgttgcagaatcgtgcttgtttcaatggagaaacagggtggttgcggaattttatatccgtccctgaaaggggacggattttttttatccaaaacattttaaaccacgcggtaaggatctgaaaccggaaaaatatacaaaaggggaaagagtatgaaagtgtacaaaaaactcatgaacgcacttgcagcagtagaaaaaattgtactggtcatttccacactgctgatccttgtgctgactgtgggaaatgtattttcccgtaaggtcatccatcgctcatggtcttttacagaagagcttgttgtagcggtgtttgttctcatcacacttttggcagcagcacttgcctgccgtgaaaaaggaggactggtaagtctgacactggttacggaccgtcttccgaaaaaactggaaaaaccatctgtgattctgatcacggtcctgagcattgttttttccgcaattttatttaaatatggaatggacaaagttcttacacagctggcaaacggcaagagaactttcgtattgaactggccggagtggatcttctggtccttcgtgccgatcggagcaggctgtatgatccttcattttattgagtactgcctcgacttctgcctgaaaaaagatgatgaaaaggaggacaaataaatgatcagtgcaatcttatttatctccttctttgttttcctgatcctgggacttcccattgcgatctgcttaggtctgtcatctgtatgtgccatcctttattccggtacatctctgacgatcgtagctacaaatatgtactccggaatcagtaaattcctgcttcttgctatcccgttctttgttctgtccggaaacattatggcaaaagccggtatttccaaacgactgatcaacttcgtagatacctgcgtaggacataaaaagggcggtatcgccattgtatgtgttatcgtagcctgcttcttcggagcgatctccggttccggtcctgcaacggttgcggcacttggagcagttctgatcccggctatggttgagcagggcggtttctccgcaccgttttccacggcattgatggcaacctccagttccatcgccattgtcataccgccgagtatcgcattcgttgtatacgcttccatcacaggtgtatctattgcagatatgtttatggctggtatcgttccgggacttctgatgggtgttgctcttgtgatcatcgttatgatcgaggcaaagaaacataacattcagccatcccgtgaaaaagcttccgcaaaagagcgctgggatacatttaaagatgcattctggggattcctgatgccggttatcatcctcggaggaatttacggcggtatctttacaccaactgaggctgcagccgtatctgttgtttacggtctgtttgttggtatggtgatctaccgtgaggttaagctcaaagatctgtttgacattcttgtggattctgcaaagacaactggtggaatcatgctgatcgtagcgagtgcttccctgttctcttttgtatgtaccaagtttggtattgcaaatgcggcatcggagcttcttgccagcattgcacataatcagtttaccttccttctgatcgtaaacatcattttcctgatcgcaggatgcttcattgatgcaaactctgcaatgtatatttttgtaccgatcatgcttccggtatgtaaggctctgggctatgatgtggtagcattcggtgttatggcaacagttaaccttgcgatcggacaggtaacacctcctgtaggtgtaaaccttttcgttgccatcagtatcaagatcaaaaaaggtctggaggttactcttcagcagatctccagagcagttatgccgatgatcgctgcatccgttgcagttcttctgatcatcacttatattccggctgtttccacagctcttccgaaggcgcttgcaaaagagggctcctatacaggagaccagtcttctgacacaggaagccagagctccaaggatgccggagacggaagtgattcctttaataccatcgcagattacagtgatcttgactggccggagatgacatggaacttcgcatgctctacaacggagacaagtacctgggctgacggcggacgtaaattcggtgagcttatggaaaaagcaaccggcggaaaagtcaaggttaatatttatgcagcagaccagctgacaaacggaaatcagtccgagggaatccaggcactgatgaacggagacccggtacagatctccatgcattccaatctgatctactctgcatttgacccgagattcaatgtagtatccctgccgtttatctatgattcttacgatgacgcagatgcaaaatttgatggtgaggccggagaaaagctgaaagaaatccttggtgagtacggacttcactgtatgggaatcgcagagaacggtttccgtgagctgacaaacagcaagcatgaagtaaaaacagtagacgacatgaagaacctgaaggttcgtgtggccggttccaatcttctcatggaatgctataagagatggggcgcagatgccacaaatatgaactggtccgagacctacacagcacttcagcagaatacggtagagggcgaggagaacccgttgccggctatcgacgcagccagcgtacaggaggtacagccgtactgctccatgtgggatgcaatctatgactgtctgttcttctgcatcaaccaggatatttatgaaagcctgacaccggaacagcagcaggttgttgatgaggcaggccagaaggctgttgagtatgagcgttatatcaaccgttccggcgacgaagagatcatgagccgctgggagaagagcaacggtgtgacctttacaaagaaagaggatatggatatcgattccttcaagaaagcagtagacggaatcgacgactggtttgtaaacgagcttaagagtgcaggctatgacgatgcacaggatctggtagatctttttacagaggattctgtagataccgtggaggattacagtgatctgaactggcctgagacaacctggaactttgcatgctccacaacagagacaagcacctgggctgacggaggacgtaagttcggtgagctcatggaaaaagctacaggaggaaaggtcaaggttaacatttacgcagcggatcagctgacaaacggaaaccagtccgagggaatccaggcactgatgaacggagatccggtacagatctccatgcattccaatctgatctactctgcatttgacccgagatttaatgtggtatccctgccgttcatttatgattcctatgatgatgcagatgcgaagtttgacggcgaggccggagataagctgaaggagatccttaacggctacggactccactgcatgggtattgcagagaacggtttccgtgagctgacaaacagcaagcatgaggtaaaatctgtagatgatatgaagaatctgaaggttcgtgtagccggctctaatcttcttatggagtgctataagagatggggcgcagatgccacaaatatgaactggtccgagacttacacagcacttcagcagaatacggtagagggcgaggagaatccgttgcctgccatcgatgcagccagtgtacaggaggtacagccatactgctccatgtgggatgccatctatgactgtctgttcttctgtatcaaccaggatgtttacgatgcactgacaccggagcagcaggctgttgttgatgagtgcggccagaaagccgtagagtatgagcgttatatcaaccgttccagcgatgatgagatcaaagcacgctgggcagacaaaaacggtgtgactttcacagagaaagctgacatggatatcgattccttcaaagaagcggtagacggcgtagatgagtggtttgttcaggagctgaaagatcagggctatgacgatggccaggatctggtagatctgtttacaaagtaatcttcatacataatcataaaagggtaaaatagccggaaagaggcagttctgagaagatttttcagggccgcctcttttctttgtgggcaaaagattatatactggtaacagtccggtgtctgccggacaggagtattattgagataaagtaaaggaagaaatatgataaaaattgatctgataaccggatttctcggatccgggaagacaacatttataaaaaaatatgcctcctatcttctgaaaaaaggcatgaacatcggtatcctggaaaatgatttcggggcagtaaatgtggatatgatgctgcttcaggatctgatgggagacaactgtgagctggagatggtttctggtggatgtgacgcggactgtcacagacgtcgatttaagacaaaactgatcgccatgggaatgtgcggttatgaccgtgtgatcgtggaaccatccggaatctttgatgtggatgagttttttgacgccctccatgaggaaccactggataagtggtatgagatcggaaatgtgatcgctattgtggatgccaagcttgcggaggatttttctgcggaagcggattatctgctggcttctgaggtggcagatgcaggttgcgtacttctgagcaggagtcaggaagctacagaggaagagatccacagcacaaaggaacatctcaaccgtgcacttggtcagatccagtgtaagcgccgtctggacagcgaaatcatggataaaaactgggatgattttacagacgaagatttggaaaagatcttgaactgcaggtatgtggcagaagattatgtgaaagaatcctatgcagaaggcggtggatttgattccctgttttttatgaatgttcataagagcgaagaggaacttcgggaaacagcagaaaagatcttgaacgacccgtcctgcggagatgttttccgcgtaaaaggttttcttaagaaagaagacggacagtggctggagctgaatgccacccgccatgagatctgcatccggccggcaaagctgggacaggagatcatgatcgttattggggagaaactgaataaagaggtaattgatggatactggaaataatactgcaggaaaaacagcaccggagagatatgtctcagagaaggcctttgaagagcttccagatacctttcagaagcttgcagagctgcttggagaagatcagtttgaactggtggcagtgaatgatgagaaagatccgcaggatcagaaagcagcttcagaaagtgctttttcggaagcaattgcggaaaagtccgatgacaatatgtacagagtggattcttatgtaaaaaacggcgaaatccgtcttgtgtatcttatgaatgatgcggtagaaagctttcttgtttttggaaatgcccgtatgacaggtgtatacaaaccggattacgagggcgagatcctggcagatttaagccggcaggggagagaatatatccttgtggtccaccaggatgattcggtggtgactttgttttttgaaactctgtctctggaaaaacatctctacgattacagccggatcggtcatttctgggtagaagggtatgaatacttacggcagctggaatatcggctggcgatcctccgcgacaaatatgattatataggcggggacagctgcaacgctctggaggagaagctttctgcactggtggaatttccgccattgaattactgctgttatccggctgttccggaaaagtatattgttcccaaggaaaatccgtggattccctcggaaaaggcatttgaggtaatgggagagatcgcaaggcaggcaggagaccgtacctttgtcaggtggcttgaaatttaccggaaacttccgtttaaatgggtagcacggaaattggcaggaatgcttcaccgtacaaaacacattcaggtaacgatgtgcctttccgaaaagttgagggaggcttcatccggatatggggatcgttcctttggaaaagaagcggatgaagaacttagagttcttacagaaaaagccaggacaaagcagacagagctgaaagagcagggtatgggatccgaagtactcagggaagaaccgtttaccattgccagagattctctgggatttaaggtttatctcatgaaatggaacaaaggaagaaaagactgtaccgttgaaattgaagaaatatgacgaaatatatatagatccgtagagaatatctgtgaagtgtttttgcccggcagggattgcttttttaaaaacactggggtataatctaacggaaagagttaagaacagccctttaattaagaaaggagatttttaaaatgaaagtaacacatattacagatattgataaattttttgaggtaattgacagctgcaagggtagagtagagcttgtaacaggagagggagacagactgaacctgaaatccaagctttcccagtatgtatctcttgcaaacatcttttccgctggtgagatcccggagcttgagatcgttgcagcagagaaagaggatatcgacaagcttatgagctttatgatcaacggctgataggaagaacgattttcagggatgtgagcttttcacatccctctattaatctgaatataaagcagaataggaatgtctgttttgtaaaatggatataatgacagcagatacagaaacaggtatttttttctctgtcatcatgagcataacaggatacaaccagggggtataatacttcctggtcaaactacgttaaaaggagtgtatacaaaatggttaaaattgatattatctccggtttccttggcgccggaaaaacaactctgatcaaaaagcttctgaaggacggatttcagggtgagcaggtagttctgatcgagaacgagttcggtgagatcggtattgacggcggatttctgaaagaggcagggatccagatccgtgagatgaactccggatgtatctgctgctctctggtaggagatttcggaacctctctgaaagaggttgttaccaaatatgatccggacaggatcctgatcgagccgtcaggagttggtaagctttctgatgttatcaaggctgtacagggtgttcaggacgaggttgacattaaactgaacagctatacaactgttgttgatgcaaaaaaatgcaaaatgtatatgaagaacttcggtgagttctttgataatcagatccagtatgcaggtgctatcatcatgagccgtaccgatattgcaagtgagaaaaaggttcaggagtccctggagcttctccgcagcctgaataaggatgctgctatcattacaactccgatcgagaatcttgacggtaagaaactggtagaggttatggagcatccggtatccctggagcaggagatgcttgaggaggagcatgagcatcatcatcaccacgacggagagtgtggctgcggccatgatcatgaagagcatgagcatcaccatcaccacgacggagagtgcggctgtggccatgatcatgaagagcatgagcatcatcaccatgacggagagtgcggctgtggccatgatcatgaagagcatgagcatcaccatcaccacgacggagagtgcggctgcggccatgatcatgaagagcatgagcatcaccatcaccacgacggagagtgtggctgtggacatgaccaccaccatcatcatgcagatgaggtcttcacaagctggggccgtgagactattaaaaaatatacacgtgagggacttgagaagatccttgaggcactttccgagtctgataaatacggtatcatcctccgtgcaaagggaatgcttccggcagaagacggaacatggatctattttgatatggttccggaagaaactgagatccgtgagggtgcaccggaatatacaggccgtctgtgcgtgatcggttctaagcttgacgagcatgcactggaggagcttttcgggatcgcataaagcatatgataaaataaatgtccgttttgacgcaaagccaaagcggaatacagatatagattgttacagaaaggaaacagatactatacattaaatcgtacagtatctgataggatggatttatggaagagaccagagtacccgtttatctgatcacaggttttctggaaagcggcaagacctctttcctgagctttaccctgcagcaggattactttcagatcgatggaaaaacactgctgatcctttgcgaagagggtgaggaagaatatgatgaggaagcactgaaacagtgcaataccgttgtggagagcattgacagtgaggaagagcttacaccggaacgacttgcggcaatggagatcctgcatcagccggagcgggtgatcattgagtataatggcatgtggctggtaagtaaattcgaagaaatggaaaaaccggaaggctggggcgtggagcagcatatcacctgtgtggatgcaagcacattccaggtttatatggccaacatgaagtccctttttatggacatggtccgtaatgcagatatggttatctttaaccgctgtcaggaagaggatccgcttccttcctacagaagaagcatcaaggtagttaaccagcgtgcggagatcatctttgaggatgaggaaggcgagcttggcgatctttttgaggatgagatgccatttgacattgatgcgccggtgatcgatatccttccggaagattatggtatctggtttgtggattccatggatcacccagaccgttatgtgggaaaaaccgttcatttcaaggcacgtgccctgaaaccgcgtggaatgggaagcaaattctttgttccaggaagaactgccatgacatgctgtgcagatgataccacattcctgggatatatctgcaagagcgcttttgccccgaagatcgcagaaggtcagtgggtggatgttactgcgaaggttgcgtttgagaagagaatggaatatcagggagagggaatcgtactttacgcagagcatgtagaagtttgtgagccacttgctgatgagatggtatatttcaactgatacgatcagagcatttgtatgccttaaggcataagaaggctgacattgaaacaggtgaattacagctgaggagtttttatgtatttaattgcaggtttgggaaatccgggaaagcagtatgaggctacacgccacaatatgggctttgacaccgttgactgtcttgtggagaagcataatatcccgcagggcggcgtaaaatttaatgccatgtatggaaaaggtatcatcggcggtgaaaaagctattctgatgaaaccgctttcctatatgaatttaagcggcggtccgatccaggagatgtccggctatttcaagatcgatccggagacagagctgatcgtgatctacgatgatatcgatctggagcctgggcagcttcgtatccgcaaaaaaggcagtgcaggcggacataacgggatcaaggatatcatccgccgccttggaactgaaaaatttatccgcatccgtgttggtgtcggtgcaaaaccgaaagactgggatctggcagattttgtgctgggtcatttttcggacagtgatcgcaagcttgtggatgaagggatcaatgatgcggcagaggctgtggagatgatcctgtccgagggcgtagatgcggcgatgaataaatataacaggaaaaagcctaagaattgaggtttgtatggaagcatttttgcatcctctgcagggtcttgcagagtttggggaaataaaaaagcgctgtggcgcaaactgcggaattcttaatgtttccggatgcatggagtcccagaaggtccatctgatgtatggactttccgggctttttccatatcatctgatccttgcggatgatgagcgcaacgcaaaggaaatctatgaggattaccgattctatgacaaaaatgtatatttttatccggcaaaggatcttctgttttttcaggcagatattcacggaaatcttctgatccggcagcggatgcgtgtgatccgggcacttctggaacaggaagaagtgaccgttgttaccagcattgacggatgtatggatttcctgatgccgctggaaaagatcagaagcagacttcttcattttaaaagtgacagtgtgatcgatctggatcagctgaaggaagagctggtagagctggggtatgaacgcactggtcaggtagagcttccggggcagttttctgtgcgtggaggaatcattgatatctatccgctgacagaggataatccctggcgtatcgaactgtgggatgatgaggtggattctatccggagctttgatgcggaaagtcagagatctctggaaaatgtagatgaaattacgatttatccggccgcagaaaagatggacggagaagatatggtatcctttctggattattttccggaagaaaaaacactggtgtttctggatgaactgaaccacctggcagaaaacggcgagggtgtggaggaagagtaccgtcagagtcgtatgcacagagaggaaaaaggcgaggcaaatcttccggagcagtggctatgtggctttcaggaactgcagaagaagctgaacagacggaattgtgtggctgtatccgcactttctcccagacgttccggatggaagatcaatgaggaatttgatcttacggtgaagtctgtagattcttataacagcagctttgaacttctggtaaaggatctccttcagtataagagtcagggataccggatcgcattgctctccggttccaggaccagggcggagcgtctggcaaaggatctttcagaggaaggactgaatgctttttacagccaggacatggatcgtatcatcagtcccggggagatcatggtggtctatggtcacgcaagacgtggcttccagtatccgctgatcaaatttgcagtgatgacggaaaccgatattttcggcaaagagcagaaaaagcgtaaaaaaaagaaaaagtacagcggaaacaggatccaggattttgcagagctttccattggtgatcttgttgttcatgaaaagcacggactgggtatttaccgtggaatcgaaaaggtagaggttgaccgtgttgtgaaggattacatcaagatcgaataccgaggcggcagtaatctctatatcctggcaacccagctggatgctttgcagaaatattcaggatcctccgaaaatgcaaaaacgcccaagctgaacaagcttggcggtcaggagtggaataagaccaagagccgtgttaagggtgcagtaaaaaatatcgcaaaagagctggttgagctttatgcagtccgccaggagaaagaggggtatgtctgcggaccggataccgtatggcagaaggaatttgaggagatgtttccttatgaggagacagaggatcagctggcagccattgaggataccaagagagatatggaaagcaccaggatcatggaccgtcttgtgtgtggtgacgttggttacggaaagacggaggtggctttaagagctgcgtttaaggcagtacaggaaagccggcaggtggtttatctggtccctactaccattcttgcccagcagcattacaatacctttgtacagcgtatgaaagaatttccggtgaaggtggagcttctctgccgtttccggacatctgcccagcagaaaaagaccatcgaagggatcaaaaaggggcaggtagatattgtgatcggcacccacagagttctttcaaaagatgtggaatttaaaaatcttgggcttctgatcattgatgaggagcagcgcttcggagttactcacaaagagaagatcaagcagatgaaaaaagatgtggatgtactgacgctgacggcaacgccgattccgagaactcttcatatgagtctcatcggtatccgtgatatgagcgttctggaagagccgccgatggatcgtgtgccgatccagacatacgttatggagtacgatgaggagactgttcgggaagccatccgcagggagcttcgccggggtggacaggtgtattacgtatataatcgagtcaatgacattgccgaagtagcccttcggatatccagacttgtgccggaggccagagtggattttgcacatggacagatgagtcagagggaactggagcaggtaatgtatgattttatcaatggagatgtggatgtactggtttccaccactattattgagacaggactggatatttccaacgtaaacaccatgatcatccatgattcggacagatatggcctttcccagctttatcagctccgtgggcgtgtaggacgttccaacaggactgcttatgcattcctgatgtataccaaaaacaagatgcttcaggagaccgcggagaaacggctcagcgccatgcgggagtattcagaccttggaagcggttttaagatagctatgaaggatctggagcttcgtggagcaggaaatcttctcggtgctcagcagcacgggcacatgaacgcagttggttatgacctttactgtaagatgctcagtgaggctgtcaaggaggcaaagggaatccggactatggatgattttgagacgaccattgatctcaacattgatgcatttatcccggattcctatatcggcaacgagttccagaagctggatatttataagcgtattgccggtattgaaagccagcaggaatatgacgatatgctggaggagctgatcgaccgttttggtgagccgacaaaagctgtgctgaatcttcttgccattgcaaggctgaaggctcttgcccatcagggatatgtgacggagatcaagcagcttggaaaagatgtccggatcacgctctatgaaaaggccaagctggatcccgcaggtatcccggctattatggcgcagtaccggagaggtttgcagtttaaggctgatcatgagccgaaatttatcctgacaccacagggaaggctgatcgaagagctgatgaagtttgcgggggagctggcaaaactggcagagccactggagtaaagggaagaatcagctaagcttagggttatccacgggaaaaaacatccggtctgtggataccggatattttcccggaaagacttgtggataatttgtgaaatgtcgtgtaagttcgtgaaattccttgctcttaaaggtgaaaacgtttataatcaagtattatggaataagagccggaccgtgattcttatggacggatagatggaggatgaaatgagaaattcagtaaagaaagcggcagttactgctcttgtctgcgttacagcggcaggaatgatggcaggctgcggaaataaaaaactcgatggtacaaagatcgcagtgacagtcaataagcaggaaatcccgcttggcgttgtaagtctggcagcacgtatgcagcaggcacaggctgaggcaatgtacaagatgtatcttggcggcagaagcgatatgtctatctggagtaccaaaatggatgatgattccgatgagacttacggtgaaaatgcggtaacaacttctgttgaaactgttgaaaagatgtgtctggagaaagaacacgcttccgagtatgatgttgaaatcacagatgatgagcagaaggctcttgaggaagctgccaagaactttatggctgccaattccgatgagacaattgcagagcttgcagttgatgaagatatggtgaagactttcctcgagcttgaaacatacgatgtgaagatgaaggatgccattgaagccaaagcggacgtgaagctggatgagaaagaatatcagcagatgtccttcagctatgcaagtgcaaaggtcagcggagatgatctttccgatgatgatatcaagaagaataaagagaatcttcagaagttctatgacaaggttaaagaggatccggctgcagatttcaatactcttggagatgagatctccgaggatatgaccgcaacaaccggaacatgccctacctatgaggaaggtgatgacagtgctgccaacggaactacttatccagatgaggttcgtaccgctttaagaaagctggacgagggtgcactgaacgaggagatcataaagacagattccgtatggtatgttgtgagactggattccaagaatgataaaactgcaacggagagtaagaaagagtctctgacaaacaccaagaaggatgatttctataatgatacaacagatggctggaagaagaaagctgatatcaaagaagagaaaaaactgatcaagaagatcaagattacagataatcacagctttacgattcagactccaactccgacaccggacccggatgtaactgagacaccgacagcagattctgcagaggctgaggcaaccgagacaccggcagctgaggagcagaccgatgtgactgagacaccggagacagaaggagattctgcaaaggctgatgaggagactgcagacagtacagaatctgaggcagctgctacaccggaagctgagaaataagatacaatgtttaaaatggaatgataagagaaaagacaacgagccgtgtacgggtttatcgtacacggctcgttttttgtaatgctcatgcctgctttacggatcatcagatcagatcgagatgctccagtgcgtgaagaatcccatccctgtctactgcgcttgtctggtatgtgcagtgtttttcgatgcctccgtaagcatttcccatagcaacgctgactccggcagctttcagcatgggaaggtcgttgggactgtctccgaatgcatagcagttttccctggggatggaaaggcggtccaggagaaattccatgcctgtggctttgctggtacccttttgtgtgacttcccagattccgtctccgtgatcaaaataggtgtaatgatcattacagaagctgcggaatttttcgacatcggaatccggcagcatatgtaccaggaatttgtcataggagtaagtgcaggcatcctcccgattgaatttcgtgatgtcgaccattggaatttcttttcgcattttgactccgaattcggactgggctggagatgcgccatcatacaggatctcagtgttggattcaaaaatcgcctcgatcttgcatttgcggagaaggtctacggtttccttgcacagaagatttgggactgtgcggaaaaaaagcaatttgttgtccatgtaaatgtgggttccacagccgtatatatagccatcgaaatgaagctctgagagtgcagagggcatcattactttggtgcggccggtgttgatgaaaagaagatgaccgttttcatgggcttttgtgagggcgcggctggtgctctccggaaccttgaaggggtgaggcgtaagcagtgtgccgtctatgtcgaagaacaggatttttttatcgttcataaggtctcctttaaaatgggatttcttcttcggtgttactgttatcaatgtcagtaatatcattaacaggaagcggttctgcggatgtatcttcaacagagttcagtgtgctgacacggatgccgttgagttctatttcactttccatggggatcacaaggcattttcgaccatcgatgatgcgggtttctaccagttctgcccggtccggtgctacatggatcaccacgtcaggggttttgatctcgaatttccgggtgttggtgatgttggatgctaccagagctgatttttctcctgcggcaagctcatactgttcatcgaagttctggagcttttcgtcttctacgccgcattcttcgaagagacgtttgacttcggatttggtgaggacaacaggttccggttcgtccttctgggattcgatgagatcgttgagcttttcgtggatctcaaggactgtgtcgtaggcacagtcatcaccaagggtttcttccaccagagcattgaaggagtcacgctgggttccggcagatagtggtgtggtgcagccgaagacttcttccaccatggtggagcggagattttcggcgtttttggtgtagtagagaagtccgtggatatcggtactgcggtcgttgaactgtgggaaaaggaagccccagtcaggcatttctaccagccagtcccggatacggtcttcaatattgtttgtctctgcattgtaatgcaggcctgctttggagagcttgaccgggcagatactgcagaggatgtgatcgtagatctcatcggaagcgtcgaacatttcggcaccgtcggaggatttgccggggatgtcgtagactgcgtggatgaggatgatgtagtagttttcaccgtagtcgtagttttctatgattctgtcgtagaaggcttcggtgagggtgtcgtcggtgagtttgcttttgcggagtttcatgaggaagttttgagttccgccttcggtttcctgatccagaggaaattccatgttgatgaggttttttccgatggtgccggtgagggtttttcggaagatgtcgaagtatttgaaggtttcttcctctgataaggataagaaggcttctttgagttcggtttttttgtttttttcaccgtctacgtagcagccgcagatgcgggtgatggagcagcggtcaggggtgaattgtttttttatttctgcgatttcttttttgttcatgtgtggtttacctcggttttttaattagtttgattatagcacaggtgtttggtgggggcaagatgacgcggacggacgtgtgagatttgcagcagaagtccgggtgccgtcgtttcgcctggtcatactaagcgtctgaggtgtctcacggagcggccggcccataactcgccatgtacgctgatgcgtacctggctcagacagatgggccttaccctgcggcttgtggccgccgggtacctctccgtgaaccacctcagacgctaagtatggaccaaggctcactccaaagcacccggacttctgctgcaaacctcacactgtgcggtcatggtgggagggatagagtggtctgacgggagttggatgagccatcagcgctgcgctggatggctgggaggaaaggctgagtttccttgtggtttgccggggaggttgtgagcgtcggcgcgttgctggacgcctgtagtttggaagcctgagattctatgtgtttgtcagggaggttgtgagcgtcggcgcgttgctggacgcctgtagtttggaaggttgagattccatgtggtttggagggaggttgtgaatgtcggtgcgttgctggacgctggaaggtggtgtcgaaatttggagatggttttttgtggtgttgtggtgggatgtgtggtatgatttgtatatcttataagatctatccatttatttggtttctttttgcttcaatgtctgaagcgttttttcaaaaaatatttataaaaactgtatacagggtttctgaagtgtttggttgatggtataattgtatataccagaaggagtattgtttgagagataatacgatttttgatgatgtttttcgtactatgatggagaaaatgacgtttctggtcgtgcctttgatcaatgatgtttttcatacatcatacccggctgatgtggagattgtgcagctgcgtaatgagtatcagcgggtggatggtgagattattacggattcgcggttgttgatcggaaacaggatttatcatatagaatgtcagagtacggatgacacgacaatggctgtacggatgatagagtatgattttgcaactgctgttgagtttgccagaaagcagggacggaggtatcggatggagtttccacgttcttgtgtgttgtatctgagaaatagtaggaatacgccggattttctggaagtggatgtggtttttccggatgggggatgtcatttgtacagagtgcctgccattaaagtagagaattatacaaaagataagatatttgaaaagagtcttcttatgctgcttcctttttatatcatgcgatatgaaaaaagagggcatgagatgagtgagaatccacaactttttcaggaattactgaatgaatatgaagtgatccggagtaaactggaggtagagatcactgaatctggaaggtccgaactgttcagtgatctgattggactaataactcggatatctgatcatattttcagaaatgaggagaaagtccggaaaggaataggtgagattatgggtggacatgttctggaactggaatctgagaaaagggcaagactgatggcggaagctaaagaacaggctgaagcactggggcgagaacagggaatggctcagggaatggctcagggaatggctcagggaatggctcagggaatggctcagggaatagctcagggaatggcccagggggaagaacgacttagtgttctgatcaacaggcttatacttgatgatcgtggtaatgagatccagaaggttgttacagataaagaaatgcgtgaagccatgtacagagaatatcaattataataagaaaagataaagagaatcccccactggttttgctatccatgggggattcgttgattgatctgaatcttataatacagaatatccgtaactgctgacaatagcatcgatcttctggcggtttttgcacagtgggcagttgtcagagcggtaggagtgatagtccgggatgtctctggcctgaaagatagagtggacagggagtgtggctacactgtctacactgctgtagatggctgccacgccgcggatcttaccgccatagtacagaacgctttcgatagctcggttcaatgtggatccggtggtgatggaaccatttaggacgaggatgttttttccattgatcattggttcatagttgtcgcggaagatcatctgcccggtgctgttgaactcaggggtgatgacgtagatggtctggtgtgcgttcatggaaaggacgccggctttggtcagttcttcggcgagataagcaccgatcacttcaagtccgtccatgcagacgatggtgtctaccggaatggatgcttcgtaatttgctgcgagagcggatgcaatacgctgtgcttcagcgcatctggatttcatagtagtgagatccaggtagtgtgtgatatgggactgggatgttacgaagtgtcccggaatcattttaagctgtatgcggttgtcagtgcgtgcataaatttttatgatgttgtcctgatccataataaaaacctcctgtcgtgatcgtgttttacgtggttgttcaggagaattatcctgaaggattacgaaacagatttatttaaccgaatgcggattgcaaatatccgattagctgtgcatattataccattaatttcaaaaaaatgaaataatataatgcaaaatatataaaaaatattcaaaaaatcaagcgtatttgttaaaaaatatccaatatcatgaaaactttgacaataggatcattactatagagtgaaagtacttgtgagtacgtagtaaattggaaagagagtgtcatatgtattattgcgtataaaaaagaggaggagaatccctaaggatcctccccctgtgagagtgagtcaatatcagccttcaatagatacatatttatcagcttcaatctcttcagctgcttttttcggaatagaaagtctcagaacaccgttctcaaattttgcatggacatcttcgttttttacaccattaccaacatagaagcttctgcttgtgctgccggcataacgttcacggcggatataattgcctttcttgtcttcctcgtctttgtcaagacccttggcagcggagatggtaagataaccatccttcagctgtacctgtacttcatctttcttaaatcctggaagatctacatccagctcatagcctttatctgtttcacgtacatcagttttcatgatattttttgcatgtttgccataaagagggttctttccgctaaagaaattatctctgaatccaaaatcatccatccagtcatcaaataagttttctccaaatacactcgggaacatcataagtcatttctcctttcaaattgaaaagccgttccggtggatcaagaaatccaactgttgccggtatatagttaccacttcgggttattccgcagtggtgatcgtttggttttattctgaacatctggaagttcttttttatcttctcctttgttctatatgtaatataacacctgttgctagcaaagtcaagaggcgagtgctaaaaagttgtgaagaatttgtgttccgtaaaatgaaaaactaatttccacctttagccctttatgttcttatattaaaaagcgaatcggacaaggtctgaaaagcttatgcagattgaacattctgcaatgttataataactttaaagcatagaaaaaaccaaaaaaatcaatataataaggcatatagacaaaatgtattaaaaaaatttttcgtacattcttctgagttgaacagacgatagaaagacagtgttcatgagtatgcaggtaaagcaaaatgtaaatgaaaaagtacaggaggagagaataatgcagaaaaaatatgcagattttaagcttggggtaccggattatgtaacagtggaaacagaagaggagagacttgtgtgccagggagggcagacgacagtagctgccggtgcaactactgtggaatttcaggacgcaggtgaacatgaggatatatttgtcacatccgaggatgcagtgagatgtgtgaaactgagatggaactataagatcccgaaatcagccagatttctgggagatgcctgggaacgtacctatggtgatgcggaatggcatggaatgagcggaaaccgttatctgccatggtattttctggcgaagttttctgagaaggttctctgctttggtgtaaaggtccgtccttctgctatgtgctgctggcaggtggataccaaaggaattactttgtttctggatgttcgctgcggaaatacaggagtacagctgaaaggaagaaagctgtgtgccgcacagatcgtcggcatggaagcagaaggagcagatacttttgaaactgcacagaaattctgtgaaaaaatgtgtacagatccgatcttcccggagtttccggtatatggaagcaataactggtattatgcttacggtgacagctccgaagaggagatcttaagtgataccgattatatcctgaaactgaccgaaggtgtaaaaaatcctccgttcatggtcattgatgactgctggcaggagcatcaccgcctggatgaatacaacggtggaccctggacaaaaggcaatgccagatttccggatatgaaaggtcttgcagacaagctggagaaaaaaggtgtccgcccgggtatctgggtccgtctgcttcttaatgaagatgagaatatcccggatgagtggagaatttcctataatgactgtctcgatccgtcccacccggatgcactggaatatatccgtaaagatatcgagagaatctgtgattggggatacacgctgatcaagcatgatttttctacctttgatctctttggaaaatggggatttgaggcgaatttaagagacaattccatggagaaatggcatttttatgatcagacaaaaaccagcgcagaaatcgtaaaaatgctttatcaggagatttatgatgcttcccggagtaacaacgcagtgatcatcggctgcaataccatcggacatctcggcgcaggcctgatgcatctgaaccggaccggtgacgataccagcggacgtatctgggagcgtaccagacgaatgggcgtaaatacgctggcattccgtcttccgcagcacaatacgttttaccatattgatgcagactgtgtcggtattttcggaatgatcccatgggagaaaaatcgtcagtgggcagacgttcttgcaaagagcggtacaccactgtttgtatccgcaaaacctggagttttgaatccggaggaatttgaggagctgcatcagatcatgctgcgtgcatcagaacaggaagagcattttgttccgcttgactgggaagaaatcgactgcccggaggtatggggagaaaacggcgaaactatcacttatgactggtttgacaacgaaggtccgaccatggatgctgcggtggagtactataatgccaaggtagttgttccgtaaatcaggaaaagtggttcagcaatccagaagatcctcggcatgatgatatttttcccggtattcccgtggcgtcatgccggtttcttttttgaaggcacgggaaaaggcaaatggattttgatatccgcaggagaacgccacgctggagacagggatatccgtgatggtcagaagctcccgggcgttgatgatcttggctgaagtcaggaatgcttggggtgtggttccaagatgttttttaaaaagtccgtaaaggtggctgcggctgatatggagatagtcagcaacatctgtcacagtgatattctgtagcggactttttttgatgtaatcaacagcctgtgtgatgtaaaaattctcattggattccatggtggtgtaggaagcatgaaattcttcctccagcagggcaatgatccggtaaagaccgctctggatataggcctcaccggaaggcgtcagttgtggatgagccatcatttcaagaatagtttcctgatatggaagaaccgaattcagctgctggaccggagtttccccggtaagatggcagtgttcgcaaagcgttggagcgttttccccgttgaaacagatccagatataagtccagggatcagaaggttccgctttgtagagagagctggtcacaggaggaatgaaaaagcactgtccggctttcaaggtatatttccggttgttcatatagaaatatccctgtccgctcagcacaaaatggatggtgtaatatcgccggacaccagggccgtaggactgttccggtgtacatttttcccagccgcaggaaataagatgaagttcttttgatgaagtctggcggttcatgacctgcttgtttttcatgagagttttctgcctttcgatatatggttattataagtaatatcagtttaaaatatttgatctgaggtgtaaagaacaaagatgaactgataggacaaaagacagttgccgtgcgataaacgtgtggcagctgtttttctgttttctgcaaaaattcagacgtaatgcaggcattgtcttgacacttgtaaaagaaaaaggtttaccaccaggaaaaatatcgttataataggagaaacgcagtttctctgcggcaaaaatataacggtccgggagatatctgtgtcagaaatattgcttatccggtgatatatcagatgatatgaggaattttccggtatgtaataagaagggagaaagatatggcatatttaggtgaagagatcaaaaaacttggttttggccttatgagacttccgcagaaatcagaaggtgtgatcgatgtggagcagaccaaagttatggtggacaaatttatggaagccggatttacatattttgatacagcatgggcttatgcaggaagcgaagatgctatccgcgaagcgctggtagagcgttatccgagagaaaaatatcagttagccaccaagatggcagcctggatcaactgcaagacaagagatgaagctcttgcacagtttaaaacatctctggagagaacaaaggcaggatatttcgacttttatcttctccacaatcttggagagcacagaacaaaatattttgatgagtacggtttatgggactggatccatgaacagaaggaagccggtctgatcagacatgcaggattttcgttccactccacaccggaggagctggatgcacttctcactgcacatccggaaatggaatttgtacagctgcagatcaattacgcagactgggaaaatccggtgatccagtcaagagcctgctacgaggtagccagaaaacatggaaaacccgtcattatcatggaacctgtaaaaggcggcatgcttgcaactccgccggaagcagtggaaaagcttctgaaggaagcagagccggaagcatccacagcatcctgggcgatccgttttgcggcaaatctggaaggcgtgatcaccgtactttccggaatgagcaatgttgcacagatggaggataacctttcctttatgaaggatttcaatggtcttactgacagtgagaaggagactcttgataaggcaagagaggctatgagcaaaattcctctgatcccatgtacaacctgtaactattgtgcaaaagtctgtccgatggaaatcggaatttccggttcttttacagcaatgaattatctgacattgtacggaaataaagccgccgcagcgcatcaggaagactggctggtagtcagtcatggcagaaagcgtgcagatgaatgtataaaatgcggacagtgtgaggaagtatgtccgcagcatatttccatccgcgaggaacttgagaaagtaagcgaggttttttgcaaataaaggaactgatccggcaggaagcggatcagggtaaggagagagtttaaaaatggaaaaattcaaagcatttctaaaacggaaggatatcgagatctctctgaagagatatggtatcgatgcactgggagctatggcacagggacttttctgttccctgctgatcggtacgatcatcaacaccattggcacacagtttcacattccgtttctgactatggcagttgccacagtcaatgatacccagtatacagtaggttctctggcatctgccatgagcggccctgccatggcagtagccatcggttacgccttgcattgcccgccgctggtattgttttcgctgatcaccgttggatttgcctccaacgcacttggcggagcaggcggtcctctggctgtactgtttgttgccattgttgcagctgagatcggtaaggcagtttcaaaggaaacaaagatcgatatccttgtaacgcctcttgtaaccatcggtgtgggtgtaggtctttccgcatggtgggcaccggctcttggaaaagctgccatgaaggtaggaagcgtgatcatgtgggcaacagatctgcagccattctttatgggaatcttggtttctgtatttgttggaatcgcactgacgctgccgatctcttctgctgcgatctgcgcggctctgggacttaccggactggcaggcggcgctgcagtagcgggctgctgtgcgcagatggtaggttttgcggtcatgtccttcagggaaaacaaatggggtggtcttgtctctcagggaattggaacttccatgctccagatgggtaatattgtcagaaatccaaggatctggattgctccgatcgtaacatctgctatcacaggacctattgcaacctgcttgttcaggcttcagatgaacggaactgctgtatcctcaggaatgggtacctgcggttttgtaggtcagatcggtgtgtatacaggatggatgaatgatattgcagaaggaaccaagacagctgttacagctatggactgggcaggactttttctgatctcttttattctcccggcagttctctgcccgttgatcaatatgtttgtacgtaagctcggatgggtgaaagatggagatatgacgctgtcataagctatatcagatcttactttaaaatcaaaaaagagtatcacaggaactcattgatagtgatgagctttgtgatactcttttattttaacttttatgctacatgtgatccggtggcattactccgttccagtccacaggcccttgcatattcatggagtttctcttttgcggaataattcagattctgaggaacctggatctgaatggttacatactgatcaccgcggacggaagggttcttcatggaaacaatgccttttcctctcaggcggatcttggaaccggactgcataccttccctgatcttacagataacatttccgtaaagggtgggaacggtggcttcaccgccgaaaacagcggttgtgtaaggaatagaaatggtggtataaacatccgatccctttcgttcatagccaggacgtgttcctacggtaaccttcagaagaaggtcaccaggctcaccgccgccggttccgggcatgccttttcctttcagacggatactcttgccggtatcaatacctgccggaatatgaatctgaagtgtctgcggtgcaccggagcttccgtccggaccggacagagagatccttttatctgcaccaaaagctgcctcatcaaaggtaacgttgatgctggcctttacatcagagcctttttgcggaaaatcctgttgatggaatccgccgaagccgttgccactgtgaaagccacttccgccaaatccactgtgaaagccgccaccgttaccggtgaaatgctcatatgtgccattgctgccgaaaccgcggctttcgccgtgactgccgtggaacatatttccgaagatatcaccaaaaatatcgtccatattttcaccgctaaaatgaaattcctgatagctgccattgccgccaccctggaatccgccgaatccaccggcacctgcgccggctccaggatcagctcctgcttcaaatgcggcatgaccaaactgatcatacatttttttcttctttggatcacttaagacatcgtaggcttcgtttacttctttaaatttatctgctgcatctgcattaccggcgtttgtatccggatgatattttttagccagtttacgataggctttttttattgttttttcatctgcgttccggtcaatgcccagaacatcgtaataatctctttttactgccatggtattcaccttcccttatattatagtctgcagcgtcccggatgattgatctgtcctctcagaggacagatctcccggactgtcatatattgaacgtatgcgtataaaattccccgggaaaaatcccgggggcattacttttatcttgttctacatgtaatataacactactaattaaaagtgtcaatacctgcattgtggaaaagaacattttggactgcaataagagatgtgattcttacagctatcagctgaaaatatgatataatactaccataaattccggtgcggtctgctcagtaaataaaaaacagagagagccgcagatcagagaaagatccaaaaaagaaaaggaggcgtataatatgagaaaaagaactcttctgtcccatataaaggcagtaaaaaggctggtacttctgacacttatactggcagcagcttttccggcgacgatccgggaggcaaaggcagcagcaggaaccacttttaaagtcaaagtcacagatggatacctggctctccggagtgagaaggcttttgacaaaggcaatgagatcggacagctgaatacaggagatcttgtggaagttacaaatcggaaggacgctacctactggtatgcatacgtgccaagactggataaatccggatatctggacaaaaactatatccagatagtagagaacgccacagcttccaacgattcctggacagtaaaggtaaaaaaaggctatctggctcttcgaagtaccgcagcttacaatgacagtaacgagatcggacgtctgaataccggagatgtcgttcttgtaaaggacagcagtgattctacttactggtacgtatatgctccggggcttgataaatccggatatgtggataaccggtatatttacaacagtggtctgtggacagttaaagtagaaactggttatcttgcccttcgcaataaggcagcctataatgaaagcaatgagatcggacagctgaataccggtgacacggttcaggtgaaggacaccagcaacgatcagtactggtatgtatatgttccgcagctggataagaccggttatgttgataggaactatcttaccggaggctcaggtacaacaactccatccatgactgttaaagtggaaagcggctatctggctctgcgcagtacaaaggcgtatgacaaggacaatgagatcgcccagctgaataacggagatacggtagaagtcattgagaagaaagacagtacttactggtatgtatatgttccgaagcttggaaaagaaggatatgtagataagaactaccttaaataaaaagataaaggatgcttgttgccggatctgcctgaagaggaacagaaagccggaacaagaaacggggaggcagaaagatgactctggcacagctcagatataccatagcaattgcaaaagccggatctatgaacgaggcagcaaaaagcctttatatttctcagcccagtctttccacggcaatccgggagctggaagcagaaaccggtgttgagatcttccgaagaacgaaccgaggaatcgccgtaacgcctgcaggcgaagaatttctggggtatgcaaggcaggtggtggaacagtacgaactgatggaagccaaatatatttccaaggaacagtcacgcaaaaaattcagtgtttccatgcagcattatacctttgcagttaatgcctttgtggagctggtaaagcaattcggcatggatgagtacgaatttgcggtccacgagaccaagacgcatcaggtcatcgaggatgtccgtaatttcaagagtgagatcgggatcctctacgtaaatgattttaaccgtaaggtacttacaaaaatgtttcacgagtatggtctggagtttcacgaacttcttaactgtcggatctacgtttatatgtggaaggggcatcctctggcgaagcgtgagaagatcacgctggaagaactgaaggaatatccgtgtctgtcctttgaacagggaggaaataactctttttattttgctgaggaggttttgagcacctatgaatacaaacggctgatcaaagccgatgacagggctactatgctgaacctgatggtaggactgaatggatataccttatgctccggtattatctgtgaggatcttaatggttccgattactgtgctgtgaagctggattccgatgagatcatgacaatcggttatgttgccagaaagggtgttaacatcagtgtccttgggaaaaaatatctggaggagatttccagatataaggataaagcactgaaataagagaaaataaaatctgacagatcactaccggagaagacgggaaaggcttttggtatttatgataccggagggttgtttccctgtgtattctcagatacgtagcgatgcgtatcatgcaggaatctgtcagatctttatttacattaaaagtttttggcagcggaaattttattctgcaagccgatcacacacggatcacaaaaccatccttacgcggtttggctgttggatactcacagtcacggtatccaagaacacagtggcccacgccgatatattcctccggaacaccccactgcttcttcagctcttttccttcctcggagtcaaaaacttctcttgcacggtgaatccagcaggagtccacgccgagagcatgtgcggcattcatgagatttcccatcacaagacttccgttttccacacaggtgcccattttgctgtcggaaaagacaatgatcacagttggggcgccgtagaacggatctgaggtgctgcccataacagctgcgttcattttggaaagccttgcaaccagctccggatcctgtgtcactaccataagagtgctctgctgtcccatgccgctgggggaatattctcccgcttccaggatcgtatccagagtttctttcggaacaagctcttttttgtaggcgcggatgcttctgcgttctaacaggtttttgatgctttcattcatgatcattacctcctgatgttaaattttgttgaaaatattttctgcaaaagaaagtaaatttctttttattctgataaaaaccattataacgcagatgattatagtttccaatagatagaaggatataactttacaatttataaagaaatattatataatctggttatgatattcctgcggcggatgcgggagaatttcgggtggagatacagagacagaatagttaagacagaaaatatgaggtgccagatggaaaagattcggaaacatttttatttttcaggaagagtacagggagtaggctttcgttaccgttcctattatattgcacagtccatgggactgaccggctgggtacggaatctctgggatgatcgtgtggaaatggaagtacagggaaccagagaagaaatccgggagatggtagaacgcctttctcagcagagctttgtggagatcgaggggattgaagagagggaaattccattggaggaggagtttggctttcatgtgagaggatagtgaaatggccggttcattccagctccagtgccagatacaacagaacagcgtcccggaattttcggggattgagaccacattttttataaatgtggtttaatttatattgaagagtatttttgtggagaaaaagcttctctgcggcatcagccagagacatttccagggaaaaataagttcgcagaaggttcttttcatccggggacagctgataaccaaacagcagaacagttatttggctacagagctgcgcagagaatatccgcctgacacgtaaaggaacatttcacgtttccggtacacggaatgatagaacggagagtacggatatcagttttacataaaaattatacaggaggaaaataaaatgaaggtagtaacagcgatcgattcttttaagggcagtatgacatccatggaggcaggctttgcagctactgaaggtatccatcgtgtggatgcggacgcagaagttcaggtaagaccactggcagacggtggagagggaaccgtggaagcccttgtcgcaggaatgaacggaaaaacagagcacgtaaaggttacggggcctcttggcgagccggtgatctgtgagtatggcatcatcgaaagcacaaagaccgcagtgatcgaaatggctggtgcagcagggatcacgcaggtgccgtacgaaaaaagaaatcctctttataccacaacctacggtgtcggtgaggtgatcaaggacgccatcgaaaaaggctgccgcagatttattgtgggtatcggcggaagcgccaccaatgacggtggtgtgggaatgcttcaggcacttggctatgcatttctagataaagacggaaagcaggtccttccgggagcaaggggcctgaaagacatcacagagatcacagctgcctatgtgatcccggagcttgcagaatgtaaatttcgtgttgcctgcgatgtcacaaatcctctttgcggagagcttggatgcagttccatctacggaccgcagaagggtgctacgccggagatgatccaggacatggatcagtggctgggtgcttacgcagagcttgcaaaggagcgttttccgaaagcagatccaaagtatccgggaacaggtgctgccggcggaatgggatttgcattcctgacctttaccgatgcagtcctggaatccgggatcaacatcgtgctggatgagacaaaacttgaggactacatcaaagacgcggatcttgtgatcacaggtgagggacgtatggatggacagacagccatgggaaaagcgccggtaggtgttgcaaagcttgcaaagaaatatggcaaaaaagtgatcgcctttgcaggtgccgtacagcgtgacgcaagagcctgcaacgatgcagggatcgatgcctttttcccgatcctccgcggagtggtaactctggaggaggccatgaaaaatgagaatgcaaagcagaatctggcagatactacagagcaggttatcagactgatgaaataaataaaaggcatatgattcgtaaatttcaggattcctgcagaaatacagagcgtgagtgtctgatctgctgtaagaataaatttggtgaaagacgctgcgaagacattggatgataatacaaaaaagacaggccacctcagaagcctgtcttttttgtggtttataatttgtaaaaataagggagctgtaaccggattaaatcaatttatggggatttcagtcttatccttcgatcggctcaaaatccacagcgccatgcttgcacagcgggcagatgatatcttccggaagttcatcgccttcatagatgtatccgcagactttgcatacccagccttttttgccttcggtctgtggctttggctttacatgtttctggtagtaggtgtaagtcatggtatcctgatcgctcatgacacgggcctctgtgacgctgcagatgaacattccgtgagtgccgagatccacatagttttctaccttcagggacatgaaagcattgatatatttgtccaggaataccaggccgttgtcggagtggtttactttctgtccggcaaatttatcggtgcttctgccggactggaagccgaactgctcaaaaacagagaacggagcatctgtggacaggcagtttacgttcatgataccggtctgctggatcacgtggtgagagtagtttgccttgttgatgttgacagccacgcgatatgggttgtcggtaagctgtgtaacggtattgacgatcagaccgttgtcctttttgccatcgttggaggttaccacatagaggccgtaaccgatgcggaacagagcagtcatatcattcttgttggcaagatcatcgctttttgcaatgtattcctggcagagctcatcagccatagcttccatctgcctgcggttttcttcatttactgcagacatgatcttaactgtggtattcagccagctgatctttttgcatttggaaagcatttctttcataaccttcgctgccagcggtgcccaggttccgttttcaatcagtcctaccgtgcggttctggaagttgtgctctgtcagacgggtaataaagtcgttcataaacggatagatgcctgcattatatgtggtggttgcgagaaccagcttggagtaacggaaagcatcgctcagtgcctgggacatatcgtctcttgcaagatcatagacaacaacgtttggacatcctttgctgcggaatttatcggccaactgctgaacggccatttttgtatgaccgtatacagaagtgtaggcgatcacgattccgtcatcctccggtgtgtaggaagaccaggtatcatagaggctaatataatgtccaagatcttcagtaagaaccggtccgtggagtgggcagatggtctggatatccagagctgcggctactttcagaagattctgcacctgcacaccatattttccaacgatgccgatatagtatcttcttgcctcatcgtcccatggttcctctgcatccagggcgccgaattttccgaagccgtctgcggaaaaaagaaccttttctgtgctgtcataagtgaccataacctccggccagtgaaccatcggtgcaaatacaaaagtcagatcgtgttttccaagggaaagggttccgccgttatctacgatgatctgatgaccttccagatccaggtcaaagaagttctgcatcatggcgaaggcttttttgttggaaacaacgatggtgtccggataagccttcaggaagtttgcgatgttggctgcgtgatccggttccatatgctgtacgatcagataatccggtttccggtcgcccagaactttctggatattatcaagccattcgtgagtaaaatttgcatctaccgtatccataaccgcaattttttcgtccaggatcacataggagttgtaggacatgccgttcggcactttgtactggccctcaaaaaggtcaacctgatgatcattaacgcctacatatttgatggtatctgtgattttcatgagcgattcctcttttctttctatggtggatttatttatatgcttcagtgatttgtttgtttcttaactttgataaaaatataacagaaattgatggcaaaaactgttgcaaatacaacaaaacaggaaaaatttccagactttacatttttttcgtgctggtataaaatcagaaacatgcagcaaaataaaatgcggatagttgctttgagagtcctcttacatagtcttgtatacaaagaggaaagtacagatatgcggaagagtattttgccggtgggaggaaaatttatggagcatatcactttatttacggatattttgcccgaagaacaggaaagaatgcgtgtctgctttaaagtccgggagaaagtttttcagaatggagaaaccatcatggaatattccagctccatgaaaaagatcggtctgatccaggagggaagagcagttctctactgctgcgacgaggatggaaatgagtatgtcatcgatgaactgaatagggacagtgtatttggcgaaccgtttctgcttccgtcagattcccagcattattatgtatgtgccactaccgtgacgaaggtgctgtttattgattatgagcatgtgatcaagcgctgtgaaaatgcctgtcatcatcacagccagatggtcagtaatcttctgcagatgacagccctccgttccaggcagcagacggatcggatatacatgctttcacgatcctccaccaggaagaagctgatagcttatctgcattctctggctgcggaaaaaaatgccgggaaattcaagctgcccatgtcctataccgcactggcccagtacttaagtgtggaccgtagtgccatgatgcgggagatcaaaaatctttcggatgagggtgtgatccgaagaaacggacggaatgtggagctgcttaaatagaggagaagatcatcatgaatgttacagtaagaaaatacgaagaaaaagatcttccggatctgatccggatatggaatgaggttgtagaagacggtgtggcttttccacaggaagaatgccttaacgaagagacaggaaaagctttttttgcagaacagacctatacagctgtagcagtagatgcggaaagcggaaacgtttacggactttacattcttcatccgaataatatcggaagatgcggtcatatctgtaacgccagctatgcggtaagcagagattccagaggacttcacattggagaaaagctggtatccgactgtctgacccggggaaaagagcatggttttggtgtcctgcagtttaatgcggttgtggcctgcaatgttcctgcaagacatctttatgagagacttggatttacccagcttggcgtgatcccgaaggggttccgtatgaaggatggacattatgaggatatctgtccgtattatcatgaactgtaagagaattttgaaaggatttttaaatgaaaaatcttcagatcactgcatacatgcagcattttatacggcagcaggtcatgccgggagacatctgtatcgatgcaacaatgggaaatggcaatgacacggctctgttaagccagcttgcaggaaaaaggggacgggttctggcttttgacattcagaagcaggcactggaacatacgaaggagcgactgaaaagagataactgtccggaaaattatcagcttcttctggagtctcatgagaatatggatgtttatgcagaagaagaaaccgtgtcctgcatcacctttaatctgggatatcttcccggcggagaccattcggtggcgaccagagcagacagcagcataagtgcggtggaaagcggacttaagcttctgaaaaaaggcggacttatgacactttgcatttacagtggcggggatacaggatatcaggaacgggatgagatgcttgcgtttatccgtcagttggatcctcataaatatctggtgatcctgtcggaatatgcaaaccggcctaatgatccgcccataccggtgctgatcatcaaactgcaatgaatacataaatcggttactgtccgaaatacaggacacagagcccggagggagctatcatgaatgattacatatattattatctgcttgcagtcaatatcctggcctttgtgcttttcggagttgacaagcagaaagcccgtcgtaataaatggcggatcccggagaagaccttgatcttaagtgctgtcattggtggcagcgtcggggcgatccttggcatgagattttttcaccacaaaacccgaaaagccagatttgcaattggtgtaccggtgatactgctggtgcagattggtgtggtgtgcctggtacagtgggcgatgaagtaaaactataaatgcaataaccataaatacaatacctgtctgaaaaaaataagacagctgtcacaggacagaggagagaccaatactccacgcctggggcagctgttattttttttataaaaggatgctcaaaaattccttcttgacaaatacttttatgatgatataatttgataatcaaaatattttaagataaaagataattcagagaacagcagtacagatttatacagactgatttaagacagatatcatggagaaaaatatgacaggtaaaatatgtggaaccggttcgtgggcaccggacagagtgtgggataacaacgatctggcaaagatggtggaaaccagtgatcagtggattcgggaaagaaccggtgtggtacagagacatattgcaaaagaggacgaagatactgtgacgatggcagcgggggcagcattaaaagctctggaagacgcagaaatgaaggcagaagaaatcgatctgatccttgtggcaaccatttctccaacagagatcatgccctgtgtggcatgtggggtgcaggagcggctcggagcggaaaaggctacctgctttgatctgaacggcgcctgcacaggatctcttctggcactgaacactgcgcaggcatacctggcccagggaatatataggaatgcccttgtgatcggagcggaaaaactgtccggtttaacggactggacagatcgtggcacctgcattcttttcggggatggtgcgggagcagtcgtgctgagagcagaagagggtggaagctatgcacaggtaacccattccattggaaaaaaaggcggtgcacttaccttacagagcagaaatcagatccgttatgaaaatgatccgaaggcaaaggaaacctacatacagatgaacggaaaggaagtgttcagctttgccgtgagcaaggtaccggaggctgtgaaggagcttctttcccgagagcaggtttcctgtgaagatatcagttattatcttctccaccaggcaaatgagcgcatcatccgttctgcagcaaggcggctgggcgaagacatttccaagttccctatgaatatggacagatacggcaatacttcttccgcaagtcttcttatcctcctggatgagatgaaaaaaagtggaaaactgcagcggggtgacagaatggtccttgcaggcttcggcggcggactgacgtacggagcaagcctgatcgagtattaaagcccctgttaatgaattgttaaaataaggctacgtagtgaatgcggatgtttttatccgcttgatccaaataaaccgcggatgcttttatccgcttgatttaattttccggaggtaaaagatgaaaacaaaagttacagaattacttggtattgaatatcccatcatccagggcggtatggcctgggtggcagatcatcacattgcggcagcagtatccgaggcaggcggcctgggactgatcgcagcggcaaacgcaccggcagagtgggtgcgtgagcagatccgtgaggcgaaaaaactgacagataagacttttggtgtaaacatcatgctgatgagtccaagtgccgatgaggttgcgaagatcgtagtagaagaagggatcaaggtagtaacaaccggtgccggaagcccggaaaaatacatggaagcatggaaagctgccggagtaaaggtgatcccggttgttgcatctgtagctcttgcaagaagaatggagcgctgtggcgcagatgcagtggtagcagagggaaccgagtccggcggacatatcggtgagacaaccactatggcgctggtaccgcaggtcgtggatgcagtaaagatcccggtaattgcagcaggtggaattgcagacggtcgtgggatcgcggcagcctttatgctgggtgcagaagccgtacagatgggaacccgatttgtggcaacagaggaatgtcacgtacatgagaattacaaacaattccttctgaaagccagggatatcgacacaagagtaaccggccgtaccacaggtcatccggtccgtaccttaagaaaccctatgacaaaggaatatctggagaaagaagctgcaggtgcatcctttgaagaactggaaatgctgacacttggtggcctcaggaaggctgttgttgacggcgatgtaaaaaccggaagcgttatgtccggacagatcgcaggtatggtaaaggatgtaccgacctgtaaggagctgatggcaagactgatcagagagacaaaagagactgtaaagaaaaacagttttcttgtggaggaataataaatgggaaaaacagcattcatctttccgggccagggtgcacagaaggccggaatgggaaaagatttttatgagaaatacgatacagcaaaggatgttttcgactctgccggtgagtggctggatctggatatgaaagcactttgctttgaagaaaatgacaggcttgacctgactgaatatacacaggctgcactggtcactacctgtcttgccatggagaaggtggtagaggagatgggacttcatccagatgtaactgcaggactaagccttggcgagtactgcgctattgaagctgccggcggcatggagctgaaggatgctgttactaccgtgagaaaaaggggaatccttatggagcaggcagttccggcaggtaagggaagcatggcagcagttatgggaatggagacagagaagatcgaggaagtgcttgcagacattgcagatgtaagcattgcaaactacaactgtcccggccagatcgtgatcacaggccttgcggaggcagttgcggaagcctctgaaaagctgaaggcagccggaggaagaagagtgatcccgttaaatgtcagcggaccgttccactccgcaatgcttgccactgcaggaaaagaacttggaaaggttctggagggtgtcacacttcatgaacttaaaatcccgtatgtgacaaacgtgaccgcagagtatgtggaagatccggcggaaacaaaagcacttctggaaaaacagatttcttcttccgtgcgctggcagcagagtgtggaaaatatgatccgtcagggagttgatacatttgttgagatcggaccgggaagaacccttgccggatttatgagaaagatcgacagaaatgtaaaagtatataacattcagaccgtagaagatgcagagaaggtctgccaggaactggtataaatattggaaaaaaagataaagaatcaaaaataaagcaggcatagtgcagcagacagaaatgccaggtaacaaatgcggatcacggatgaccgcataacatcagaaaggaattcatatgtcagagaaaaaaatcgcagttgtaacaggcggtgcacgtgggatcgggaaagccatcgccctggagcttgcaaaagcaggaaaccttgtagtgatcaattataacggctcagaagaaaaagcccgggaaacaaaagcagagatcgaggcagccggcggccaggcagatatcctgcagtgcaatgtggcagattttgatgcatgtgaagcttttttcaaagctgttgcagaaaaatacggacgtgttgatatcctggtaaataatgccggagttacgaaggacggacttctcatgaaaatgagtgaggaagatttttccagagttgttgacatcaatctgaaaggaaccttcaactgcatccgtcatgtgtccagaatgatgctgaagcagagaagcggccggatcatcagcctttcatcggtggtaggccttcgtggaaatgcaggacaggccaattatgcggcatccaaagccgggatcatcggtcttacaaaatccgctgcaaaggagttggcatccagagggatcacggtcaacgctattgcaccgggatttatcaaaacagacatgacggacgtgctttctgacaaagtaaaagaaaatattgcggcatctatccccatgggaagcatgggaacaacagaagacgtggcaaaggcagccgcatttctggcatcagacggtgcacgttacatcacaggacaggtacttcgcgtagacggcggaatggcaatgtaaagaaggctccccggagtcaggaggatagattgatgaaaagacgagtagtagtaacaggacttggagcagtaacaccgatcggaaatgatgtggaaagcttctggaacggagtaaaagaaggaaaggtggggatcggaccgatcacccgttttgatacgaccggatacaaggcaacactggcagcagagcttaaagattttgtggcaaaggatcgcatggatccgagaactgcaagaagaatggagcctttttcccagtatgcggtagcggctgcattggaagcagtggaaaattccgggcttaagatggaagaggaagatccgtacatggtaggcgttatcatcggctccggtgtgggaagtcttcaggctaccgagaccaatgagaagaagcttatggaaaaaggtccttcaagagtggatccgcttcttgttccgaagatgatcacaaatatggcagccggaaatgtttctatcgctaccggcgcaaaaggaaaatgcaccaacgtggtaacggcatgtgcgacaggaacacattgtatcggagatgctttccgtgccattcagtatggtgatgcagatgtaatgcttgccggtggtacagagggagctgtctgccctatcggtatcgcaggctttgcaagccttactgcactgagcacaagtgaggatccgctgcgtgcatccattccgtttgataaagacagaggcggttttgttatgggcgagggtgcaggtgtggttgttctggaagagcttgagcatgccaaaaagagaaatgccaatatcctggcagaggttgtgggatacggtgcaactgcagatgctttccatatcacatctccggccgaggacggaagcggcgccgcacgtgctatggaaaatgccatgaaggaagcaggtgttgcaccggcgcaggtagattatatcaatgcacacggaaccggaacacatcacaatgatctgtttgaaacaagagctatcaagcttgcgtttaaggacgctgccaaggatgtaaagatcaattccacaaaatccatggtgggccatcttcttggcgcagcaggagctgttgagtttatcgtatgcgtaaaatccattctggacggatttatccatcagacagtgggaacaacagaaacagaggaggagcttgatctgaactatatgatcggcgctccggcaaaacaggaagttcgttatgcaatgagcaattcccttggatttggaggacacaacggaacattgcttgtaaagaagtatgaggaggactgaagctatggaatttaaccagatccttgaactgatcgatcacgtatctgcatcagagcttactgcctttacatatgagacagcagatctgaccttaagtatggagcatggaaagccacagatcatccagggggttatgggagaaactgtggaaaacattccggcagtaggaatgaccggtggaaaagtccgcagggcagtgaatacagcaccggtggcaggcaaagatcctgtggtaccggcttcaacagatgaaatggcagtgacaggaaaaactgtggcagaagcacagggagtgaaaggtactgagcagtcggaaaacgtaccacagagcggggaagatcagacaggcagcctggtaacatctccgctggtaggaaccttctatgctgcaccgtcacaggatcttccgccttacgttcaggtgggagacaaggtaaaaaaaggacaggttcttgcaatcgtggaagctatgaagctgatgaatgagatcgaaagtgattttgacggcgagatcgcagagatctatgtggagaacggacagccggtagaatacggtcagaagcttttccgtatccgataagtaccttcagatcagaatcagagaataagaaaaattattgtttcaggaggatagagaatgaagcatcttgatgtaaaacagatcgaggagatcattccacacagacatccgtttctgcttgtggactatattgaagattatgagccgggtgaatttgctgtcggatataaatgtgtgaccttccgcgaggatttttttcggggacattttccccaggagccggtaatgccgggtgttctgatggtagaagcgctggcacaggtgggtgcggtagccattctttccctggaggacatgaagggaaaaaccgcttatttcggaggcatcaacaagtgtaaattccgcagaaaggtagctccgggagacaagctccgtcttgaaacaaagatcatccgcagaaagggtcctgtaggcattggttctgcagtggcatctgtggatggcgaggttgccgtagaggctgagcttacatttatgatcgggtaaggtgattgtatgattcgaaagttactgatcgccaacagaggcgagatcgcggtgcgtattatccgtgcctgcagagaaatgggaattgccacagtggcggtttattctgaggcagatgaggaaagccttcacacacagctggcggacgaagcaatctgtatcggaccgggaccatctgcacagagctatctgaatatggaacagatcatcagtgcaaccatggtttccggtgcggatgccattcatccgggatttggttttctttctgaaaatgccagatttgcggagctctgtgaaaaatgcgggatcacatttgtgggtccgccatcaaaggtcatccgtatgctgggcaataaaaaaattgcaagaagcaccatgatcgcagctggtgttccggtagttccgggcagcgaaggggatgtggaggatattgaaaccggtcttaaggaagctgagaggatcggttatccggtgatcatcaaggcagctcttggcggcggcggaaaaggcatgcgtgtggcaaacacaccggaggaatttccggaagcctatgcaaccgccagaaaagagtctgagatcgcttttggcgacggtaccatgtatattgaacatttcgtggtaaatccgagacatattgagtttcagatccttgcagacagcttcggaaatgtgatccatctgggagagcgtgactgctccatccagagaaatcatcagaagatgatcgaggaatctccaagtgctgcagtttcttcggaattaagagaaaagatgggtcatgcggcggtgacggcggcgaaagcagccggttacgtaaatgcgggaacgattgaatttcttctggaaccggatggaaaattctggtttatggaaatgaatacaaggatccaggtggagcatccggtgacagagtgggtaacaggaatcgatcttgtaaaggagcagctgaagatcgcttccggaatgcctcttgagatatcacaggaggatgtccggatccagggacacgctattgagtgcagaatcaatgctgaaaatccccagaaaaatttccgtccttcgccgggaactatccagggagcgcattttccggggggaaacgggatccgtgtggatacctgtgtgtataacggctgtaagatcccgccttattatgattccatgcttgcgaagctgatcgttcatgcaggtaaccggaaagaagccattgcaaaaatgcagagtgctcttggtgaggtgatcattgacggaatcgatacaaatattgactatcagtacgaaatcctgaaagatgaggattatcagtccggaaactttgacactggctttcttgccagccatatcattgcgggagtgaagatcaatgagaattaagcacatgttcaaaaaaacagtcagggatatccggggggaggaacaggaaaacattccggaggtgccggataacctgatgcgtaaatgcaacgtctgcaaagcggcggtttttgtagacgaggtaaagcagaatcaatacatctgtccccactgcggaaattatttccatgtacccgcttatcgtcggatcaaaatgatcgcagatagaaagagctttgtggagtgggatgctcacatggaagaacagaatccccttcagtacagaggctacgaagaaaagcttcaggggcttcgtgaaaagacagggcttgatgaggctgtagttaccggaaagtgtactataaaagggacatctgtggcacttggtgtctgtgactgtcgtttcatgatgtccagtatgggagaagtcgtgggggaaaagatcacgcgggtttttgaacgtgccacagaggagaagctgccggtaatcctctatatctgttccggcggtgccagaatgcaggaggggctggtttccctgatgcagatggcaaaaaccagtatggccatccggaagcacagcgatgccggacttctttatgtgccgatcctcacagacccgacaacaggcggcgtgacggcaagctttgctatgctgggagatattatcctggcagagccgaaagcgctgatcggttttgcaggtcccagagtgatcgaacagaccatcgggcaaaagcttcccaaaggcttccagagagcggaatttcttctggaacacggctttgtggacaagatcgtaaagcgtgaggagcagaggatcgtattggcggatattctgagattacatcaggataaagtcctaaataatgtacagtccgataatacggacattaaaaatgggttcaagtctgacaatcaggaatcgatgaaaactgttgaggaagataataggatctggccggacttcgttccatccggagatttcactccctgggaacatgtccagcttgccagagccaaaacacgccctacaggaaaggattacatcgaagcgctttttgacgatttcatggaatttcacggagaccgtcactgcggggatgatccggcagtgatcggtggtgtggcatttttccacggacagccggtaactgtccttgtacaggaaaaaggagagggtacaaaggaaaacattacccggaatttcggaatggtatctccggaggggtactggaaatccctgcgtctgatgcagcaggcagagaaatttcaccgtccggtgatctgccttgtagatacgccaggcgcattctgcgggctggaagctgaggaacgtggacagggtgaagccattgcaaaaaatctctatacactggcaggtctcacagtgccggtgctttccgttgtgatcggtgaaggcggaagcggaggggcccttgccttggcggtggcagatgaggtatggatgctggagcattccgtttattccatcctgtccccggagggctttgcctccattctctggaaagacagcaaaaaggcaaaggaagcagcagcagtgatgaagctcacagctacagacctttaccagatggggatgatcgagcatgtgattccggaagcagagcctgtaagccgtgagaacataaatgatattgcgggttatctggaaaacggaattgcggattttcttgagaaatatggcgaagaagagccggagaagcttctggaacatcgctatgaacgtttccggaaaatgtagaagcaataagtgcagtgattttgtagcccgcaaagtaaaaatccagtggaaaaaatgccatatttatgttacgatggcttcataaacagagaaccggagaagcctttttgctccggagaaacaggagcgggtagagtggacaatcgggaagttataaatgacgtgctggtgaatctgttcaatgagatcctccgactggaggaggaagccatcatcacagataaatataaagatatttccaacaatgatatgcacattatcgaggctgtaggtcttggaggggggaacatgtcctccattgcagccaagcttaagatcaccgtaggctccctcacaacatctatgaacagtcttgtaaaaaaaggctatgtgaagagagagcgaagtgagaaggaccggcgtgtggtatttatccagcttacaaataagggacgtatggcatatcatcatcatgcggagtttcacaggcagatgacagaagcggtgatcgcagagctgaatgagaatgagacagaagtgctggtaaaagcactggacggactgcgtaaatttttcagacagtatcacgaacaatgaagaaatgtataataaaagcatccggatcggtaataaaggacaattaccgatccggatgctttttgcataacaggcattttcgacacggacatttattgaaaatgatattaaatgtcgcctttgtttttgtgatacgagagtttattcgtcccagccatcctggaagcggatatttacagagatattgcggacaacgtctccttcctgaagctccagatcgctctcatcggaaaccggaggaagctttccctcaaattccataagctctgtgtagatccagtcgtatgcagctgcattggcattttcgatggcatcatccagcgtgtcaccgttggcttcacagcaggcaagatccgggaaaaaagcattgtattttttatcctctgtgggacggaaaactgcgggatatataaatttcataggtaagattcctttcttttttaaaatgaagtgatccgtgtaatactacgaatatggatagttttacctgaccaaggtaagtatataccaatttcagaatgagggcaagcgagttcatgatccaatgaaagatctaaataagaacagcagagttttgggaatgctataatcagaaaattgtcgtatataagtaaaaatgatagatatataaccctttttgtccttgtatataggaaatatagatgctatactgtgtaatacagagtatgaacggggggtcgaaagacctgacgggaggcacagctatgatttatacagctttgacgaaaaaagctatgaaggtggcgtacgaggcacatcatggacagacagatcgaagcgggacaccttatatctttcatccatttcacgtagcggagcagatggatgatgaactcagtgtatgtacggcacttctgcacgatgtgatagaagatacagagatcacatttgaggatcttaccggagaatttccggaagaggttgtggaggccttacgttgtcttacaagagataagaatatgaattatttcgattatatccggaagcttaggaagaatccgatcgcaaaaaaagtgaagcaggctgatctgctccacaattctgatgtaacacgtctttctgactgcgaaaatatgtctactgaacagatatcacggctgcatggaagatataaacgggctttggagatacttcatgatgccaggtgatattattttcgcacaagtcatttattgacttttattcagttttttcatgcgcatgatccacacaaaatatccgtgacctcagatattattgtggatcttcttagtggaagtatggatttcttgcattgatctctatgtagcatttgatcgcatatttgataaattctatgatttttttcattttattttcctcctcttttctttaacttacaaatgcattataataaactctcggaaacattacgtgccaaaaacacagaaaaagtagtcaaatattgcggagagaaaaatccatgtttccagtatacgaagaaaaaaagaagaatctccatattcatctgcggacctcagcccatgcttcacctcatcttcataattccatagagtttatctatatcacagagggaactctggagcttggtatgggacaggagctttatcatatggaaaagggagatcttgcagtgatctttccggatgtgatccatcactatcaggtgttctctccgggagaaaacaaagcagtctatctctgggcaaagccggtattgactggtcagtttgcggatatcattcagaacagctgtccggaagacccggttataaaaaaggagcaggtgcatccggatattgtaaatgcggtacggtgtctcagggcaaaccgcaaggagaaggatgataatcttgcagtggaacaggcgtatgtgcagatctcgggatttgaaagtcagaggacttttaaccgggtattccgggaacggtaccggatgacaccaagagaatacagaacattatataaggaaaaatatttacgagaggaacagacatgatcacagtagagctggaacatttcagccttgataaaatatgcgattccggacagtgcttccggatgagaaagcttggagacggacatttttccatggtggcgggagaccagtatctggaaatgtatcagaaagacggagtggtggatttctgctgctctcaggaggaatttatctgttactgggtgctttattttgatctggatacggattatgaagcttacatgaatgctgctaatccacgggataaatatctgggtgccgcaataaaggcaggagacgggatacggatattaagacaggatctctgggaaatgatcgttacgtttctgatatctcagcagaacaatatcaagcgtatccgcaaatgtatcgaaaccatctgccggaagtacggagagcgaaaaaattcatctgcaggtgtggaatactacgcttttccgactgtagaggcgctgagtcaggcaacggaagaggagttaagaggatgcggcctgggataccgggcaaaatatatcgcagtaacggccaggaccattgcatccggtcagatctccctggaaaaaatctatgatatgcgttaccctcaggcaaagaaggagctgatgaaactctgtggtgtgggagaaaaggtagctgaatgtatctgcctgtttgcactgcatcatatggatgcttttcccatagatacccacatccgtcaggtcatggacgtgcattacaaaagaggatttcctaaccgcagatacagaggaatgcgtgggatcatgcagcagtatattttttactatgacttgtactcatagactgcggatgctatcataggtgaaaataaaggaaaaatccacggaggaaaaagtaatcagaaaatatttactgcgattgagacaaccacgtataaaaaagaaagaaaacagatattatatccggggctataagggaacggaagtgatcatccgtacagatcatgagattctgaagaggattgcctacaggcgtacctgcgtgaaacaagtctgcattcctggaagatatgaaacagaaacaaaatatatctatacaagaaaagaaaacagaagaagccgcccagtcatagttccgggcattccgaccgggagagaaactgctatgccacgtgccgtgcggacagtgctccatgctctttcctatggcgggatcgaagtggaggcttccagaaagctggcagatcttaagaagatggatcctatgaggatcttttacaggacgctggatgcggaagtttataacggagactataaagtgccgatccgtctgttttttccaacagaagaggacatggaaaacggtgccgcctccggaaaaaaaccaccggtgattctgtttttccatggcggtggctgggttacggaaagtgtagagaattatcagcgggtttgtgccagaatggcacagtctaccggtcagatcgtggcgtctgttgaatacaggctggcaccggaataccgtttcccggtgggactgatggattgttatgcagctgcgaagactttttacaccaatcgttttcttctgaatacggatccggatcgtatcaccattatgggagatagtgcaggcggaaatctggcagcggctgtatgtatgatggccagagaccgcggagatttttttccaaaaaaacagatccttatttatccggcactgaacaactgttatacggaagactctccctttgaatccgtaaaaacaaacggaaccggttatcttctcacagcggagaagatggaagattatctgaaactctatgagagttgtccggaagacaggaggaacccctattttgcaccgatcctggagaagaatcttcgaaatatgccggatacactgatacttaccgctgagttcgatcctcttcgggatgaaggtgaggcatttggcgaaaaactgaaggaagcgggaaatcgtgtggaagtgcacaggatcgcaggtgcgtttcatgggtattttgcactggggatcaaatttctgcatgtgcaggagagctttgcatatgtaaatcgttttctggaaacagaggaacaggaagaaggaaagcatcatgaagaacgaatatgcacagtggagaaaacttgacaatgcggcgctggcgttcccggcggtgacaggaaagaatgacaccagggtatttcgtttttactgtgaactgaaagaagagataaaagaagaaacactgcaggaagccctggagaggacactggaaaaatatcctcttttccgtgcagttttaagaaagggactgttctggttttatctggagagacgtgatattccggcagtggtaaagaaagaagcaggtgcaccttgtagcggactttatattccggacaaaaaaacgcttctttttcgggtgagctattataagaacaggatcaatttcgaggtatttcatgcgctgacggatggaacgggagccatgcattttctgatggagctggtgaaaaattatcttcaggagacgcacccatccgcagagcttccggagctttttccggatgagaacattacaggcagggatatggaggaggacagtttttctcagtattattcctccgatgcgccaagaaagagagagtccaagaagcctgccttccagctaaaaggcgagaagctcaggcaggaggatatgaatatcacggaagtctgtgttccggtaaaagagatccacgcccgtgcaaaagcggccggtgtgtcgatcacggtttttcttacggcagctcttatctgggcaatccatgaagaagtgcctcagaatcaggcgaaaaagcccattggtctgatggtcccggtaaatttgagaaattattttccgtcccggtctatggcaaattttttcggatggatcgagatcagctgttattttcagcctgatacagcctttgaggatattatgagatccgtaaaggagcagtttgcaaaggaactgagtaaggacgtgatcgaagcaaagctgaatgatctggtaagcctggagaaaaatccgatcctgcgtctggtaccactggagatcaaaaccccgttccttcttgccgggacgactctcggagggaggtctatcacggcgatctattccaatgtggggatcattcggatgccggaggaatatcggaaatatattcagagattcggactttttgcaagcacggacagtctgcagctgtgttcctgttcttttggagatgagatggttttaagctttacgtccaagatccccaatggaaatattgagcggaattttgtggagagactgaaaaatgagcaggtatcctgtacaattcgggagaatgatcttccgggacaaaaagaggagcagaaacagcagatgaagctttttgagagctttacatttctgtgtattgtgctggctgtggtatgtaatctgatcgattatctgctggatggtcatataggctgggactggtttgtgactgcaggggcgttctgcacctggctgatggtttcagtggcttatgtgaagcggcggaatcttctgaagaatgagatgtggcagctggtgatcgcagctgttgcaggagtgctttgggatgtgttcaccggctggcgtggctggtctgtggattatctgcttcctctggctgcgcttgctgtgatctgctccatgtgggtgatcactgcggtacagaagctggaggtggcggaatatatgatctatcttctggaagcaggagctttcggaggagtgatccctgtgatcctgctggctgccggggtggtgacggtgctgtatccgtcgctgatctgtatatgcgtcagctttctgatgctggtatggctgttcctgtttaagaggaaagatatggtgcgggagatgcagaagaaattccgtgcatagaaaataaaaacaaccgtcgatctgcagaggactttttgaagatctgtctgcagaccggcggttttttgatcaaatcaagggagtctcctgcagggttgcgaaaagcaataagcagtgagggaaacttgcccgatgttcggagatcagaatccgaagtcctcatagtcctccggtgtgaacttatgatagatcatatgctcaccctccagggacagacaataccggtagtcatccgggatcccgtcttcgaaatatacgagataatcaaatccggttccggttgttttttccacgtgtacatgttcggaataagcatgaaaaacgtccatcacttcatccagagtacagccatgacgtgcaaccgtgcctataaagtgtaccagaaattcactcggtttccggctttcgtgaacgtagtccgaggcctgaggcggcagggtgatgcagaaacgcccgtttttggaagaagccgttacttttccaagacggtcacaggcatgatctgagaatttttccattgcatgctgcatttcttcttccgtaagctctgtgccaagaaggcggttcagagactgcagcggataataaaaacgggtaactccgctcatgtatccgatctttacttgttgttcctggatcatatccaggagattattttccagttttttgaaattcattatgtttttcctttccgaggtctgaaggtttattgaactgcatacattcagatcccatttttttcgcagatatcattgagacagcagcggtcacagtaaggctttgtccgcgctgtacagacttctcttccatgattgacaagacggtggcagagatcattgccttcttccggagggatgatcttccagagagccatttccacctttttcggatccttcatgtcatggacaaggccgatgcggttggaaaggcggatacagtgagtatctgttacaatggcgggcttgccgaatacgtcccccatgatcaggtttgcgctttttcggcccacaccgggaagcttcagaagtgcgttaaagtcttccggcaccttgtcgtgatactgttcgtggagaatgcgcatacaggcgctgatgtcccgggctttgctttttccaaggccgcagggacgtacaatggcttcgattgcttccggctctgctgctgccagggctgccacatccgggtattttgcatagagatcctgaacaactacattgacccgggcatcggtgcactgagctgccagacggacacttacaagaagcttccaggcatcatcataatccagtgtacagtctgcatccggatattccttttttaaacggctgataacttcataggccagttcctgtgttgtcatttgtatatgaaccatcctttcaatttcggttatattactgaattactacagccaggatgataccacagcattcggagaattacaaggtggacaggagtacagaagcagtgtgtggcatttggaattttatcagcagagcaattttgggaatcccccccaggggcttgttaataccctgacaatttggtacattaaacgtgacctgtgagggacctgatctccctcacgtgaatagaaaagtgcggaggaatcaacgtggaaaaacttctcgatgaaatcgaatcttactggagcacccgtacagaagggtactccgaagtgaatcataaagagcttgcaggaacgcagaaaaacgcatggcttaaggtgctgaccagtcagtttccggacaaacccaaggaagagatccgtatcctggatatcggaacaggccccggattttttcctgtgatcctggcagaagccggatatcatgtagatgcagtggattatacggaaggaatgctggaaaaggcaaaggaaaatgcaggagacctttgccggaatatccgctttttgaggatggatgcacagaagttggattttgaggataatacctttgacgtggtcatttcccgaaatcttacctggaatctggagcatcctgatgttgcttatagagagtgggtccgtgtactgaaggtaggaggaagacttctgaattttgatgccaactggtacggttatctttatgaggaagagcagcgtaaggcctacgaaaacgaccggaaaaatgtggaaaacaacagcctggatgatcactatctctgtacggatattgagcgcatggagcggatcgccctccaggtaccgctgtcaaagatcaatcgtccccagtgggatgtaaaaactctccgagaagcaggacttcttggaatccgcacagacacagaaatatggaaaacggtctggagtgaggaggagagattaaattatcagtccacaccaatgtttatggtaactggtgtaaagccggatcatttcctgaatcttccggttgcggtaggagaaaaaacagaaggctttcttgagctcggagatggagaatttgtccttcctgcaaccatcatccgtggaaaagatcctggaaaaaccgttctcgtcacagcaggtcttcatgcaggagagtatgtggggatccagactctgatcgagctgtcgaagcggctgaagccggaaaaggtaaagggtcagctggttctggtaaaggtgctgaaccgggaagactttgagaagcgtgcaggcagcatcagctgggaagacggaaaaaatctgaaccgtgttttccctggcagaaaagatggcacaaaaatggaacgactggcagcggccatcacagaatccctgatccggaaggcagattattatatcgatcttcacggcggtgatgattatgaggaactgactccgtatgtatattttgcaggcgtggcaaagccggagatcgtggaagcttcccgaaaaatggcagagcaggttgatgtcccatatatggtacagtcaaatgtgagtacaggcggcgcctacaattatgcggcaagtaccttccatattccggcggtccttctggaacgcggctgtatgggaacctgggaacgggaggaagtggattccatgcgaagagatgtaagaaatatcctctgcagcatcggagcctataacggaatccgttcccacagtacgtactatccgctgaaaatggatgatgtgcgttatcagtgcgccagtgtcaacggtctctggtatccggtgaagaaaccaggcgatatcgttcatcaggatgagtatcttggagagatccgtgattatgagggaaatgtacaggaaatctgtcgtgcagacatggatggtgtgatcctttatcaggtatcaagccttcaggttgtggaaggcggccctgtgatcacctacggaaatatcgtaagagaaaaagacgagcggaaaacaaggatcgcccagtactggaccaggcgcagcgacagctttctggaacagagaagagcagagcttcacagtgcacttgcaggccgctggatggctgagcttaagaagtatctgcctgagaaaaagaatctccggatcctggatgtaggctgcggaaccggattttttaccattcttcttgcaaaggaaggccatcaggtaaccgggatcgatctgacgccggatatgatcactcatgcaaaggagctggcggaggaagaaaaagcagactgccggtttatggtgatggatgcagaagctccggattttccggatgaggaatttgatgtgatcgtatcacgaaaccttacctggacacttccggacgcggagcatgcttatcaggaatggttccgcgtactgaaaccgggcggagtgatgataaatctggatgcaaactacggagcagcagactttgcggacactgcggatcttccggagaatcatgctcatcatcagatccaggatgagctgatgcaggaatgcgaggatatcaagcggcagctgcccatcagttcttttctgcgtccggcatgggatctggaaacgctgagccgtataggtgtggaagaattttcctttgaccttggtatcagcaaacgtatttatacagaaaaagacgagttttacaatccgaccccgatgtttttgatctttgcaaagaaacagaggtaggatcatgctgaatataaaacagatacagtattttgcggcctgtgccaaaacaggctccttcagccaggcagcagagctgctttttaccacgcagtcaaatgtaagcaaggtgatccgttccatggaagacgatatgcgtacccagctgtttgtccgtcatgcaaagggcatagagctgacactggaaggagagcgtgcatatatccatgtgcagaggatcctggaaaatatagatgaactggaaatgcaggcacagccacttgcaaaaagcagcctgtgtgtatgctttcatcccagctcctggtttgcggatatcttcgtaacgtattatgaagcacataagtgcgatgatcttcattatcaggtttacgcagcagatacccatgagatcataaaacgtgtgaaaggcagacaggatgatatgggattcgcctatgtgatgcagaatcagctggcggcgttccagtattttctttcccggaattacctggaatttgagctgctgacggaaaccgaggtaaatatttataccgggaaagggaaagcagatgagggagattttaatatgtcccagctcaggctgatccagagatttcccgatgaattttccccggataattaccggaaccttgtagaggaaaacggtcattccgcagtggaggcagagactgtagtcgtaacaaacagtgattatatcgtggaacgtcttcttgggtccggagagttgtgtaatatcagtggtgcggatctttccggccgtgatccgggatattcctccgtgaaatatacatttccgggagaaggccagaaacttgtttacgggtgcatctgccggagaggtgaagagctcagtgaacagggaaaggattttctgggattcgtgaaggaaagacttcagatttccggaaagtgataaaagaataaagcaaaagaccagacgggatttttctgcacgggacacaggttcctgatacagaaaagtcccgttttttatatggaatacacatccatgctaaaaccgactgtccaatatccccgtaccggggttgtccgaaagctgttaaatgataaaataatatcagcagcacactccgcgtgctgaatataaaaacactgtgatgcacataacctccgcgcactcctatttgtgcatacaaatgttttgtcgaataataacacgaccctttcaaaagcagttatggttttggatgccataactgcttttgaaatatgaacacaaatcgctccacgatttgtgttcatgagcatgcagcagagcggaatgcgaatgtctgtctgaactgtaaagggcagtgggaaaggaaaattatgaacaaagaaaataaactggtcatccggatcctgaagcggatccttctgcttgctgtggttatgtttcttctgtctgtggtggtgttctggctggcgagactggcaccgggagatcccctgcagtccttttacggagattccctggaaatgatgaccagcgaggaagtggctgcggccagaacgagactgggtctggatcaggggatcggggtacagtatgtaaggtggtttaccaatgtagtccatggtgatttcggattgtcgctgaaatacaggcagccggttatgaatgtgatcaaaccgctgatcggaaatactttggtgctgggaggaattgcttatattgtgatctttatactggcagttctgattgccatattctgtacgctccatgaggatcagtggatcgaccggctgatctgcaagatcggaacagcagcctattatgtgccggctttctggcttggtgtggtactgatcctgatcttcagtgtaaatcttggatggttcccaagcagcggtgcctatgatgtaggaatggcagatagtatcggcaatcgtatgaagcatatgatccttccgctggtagtaatgatcttcagccatctttggtattacgcatatatgatacgtaacaaatttctggatgaggtgcggaaggattatgtacttcttgccagatccaagggactttccaaaagaaagatcctgtggaagcattgtcttcgaaatgtaatgccgacgatcgtgagtatcatggcagtttcggtaccccatgtaaccggtgggactgtaactgtggaagctgttttcaattatgcgggaattggaaaccttgcagtggaatctgcaaaatatcatgattataatctgctgatgatcgatgtgctgatcacgggatttatcgtatttttaagcagctttgttgcacagactgtcaatgaagagatcgatccaagaatgaaggattcggaggtgagggtatggtagttgaccggaagctttcagaagttgagctttttcaggtagttggtgccgggtggaagcagcatgaatctgaaaaacgaaaaaaaacatttcaggaaaagctgaaggggaaaccggtattttccatgttcctgctttttctgatcgttttgggctgtgtatttgcaaatgttgttgcaaatcatgatccctcaggtttttatctccagaatctgaatacaccgccgggaaaggaatttatctttggaacggattcgcttggaagagatatttattcactgatctggtatggcggacgggtttctctggtgatcgggcttctgggagctgcgatcattactgtgatcggtgttacctacggatgcatcagcggaacagcaggtccaaaggtggattcagttctgatgcggtttacggaaatgtgcggaagtattccgacccttctgctgatcctgatcctgtctgcggtccttcaggccaatgatatgatcagcatatctgtgatcatcggtattaccgggtggtttgcactggcacgtattgtaagaagtgaagtgcggcagataaggaacagtgattatgtgatgtatgcaagactctgcggaggaagttttggatatgtgatgtatcaccatctgatcccgaattttgtttcggcgatcatgtttgtggtgatctcttcgataagcagctgtattaccatggaatctacattaagctttcttggcctcgggcttccggcaaatgtagtctcctggggaagtatgctctcactggcaaataaagcactgatcatgaatacctggtgggtgatcgtgatcccaggagtttttctggtcattactttaatgtgcattaccagtatgggaagctttgtgagaagtgaggtaaataaccattacagcaatctctgatgcagtcaaaaatatttgaatacaaaccgtgatgaagcattccgaagtgtagataaccggtttgaaaataaggaaagatgaggaaaacagaatgaaaaagagaacaggaatcaactatggcagaaaatatgcggcgataacactggcagtagtgaccgcagcatgtacaggagcagctgcaggcagtgcggtaaccgtagctgcggcagaagaaaacaaaactctggtatatgcaggtgagtcagaaagtacaattaatccccttctgaataaccatgatgaacttccggatcttattttttcaggactgatgaaatatgatgccaatggaaagccggtagaggatcttgcagagagttatacctttgacaaggataccaatacctatacttttaaacttcgagatggtgttaagtggcatgatggagaagatttcaatgcagaggatgttgtatacacctataaggagcttacagaggatgaaaccctgggagccagcatcaccagcaactatcaggacattacaagtattgaggcaccggatgatcagactgtgatctttacactggatcagtatgatgctgccatgctggattactttaccatgggaatccttccagagcatcttctggaaggggaggacataaatactacatcctttaaccagaatccggtgggaacaggccgttataaatttgaagactgggatgctaccggcggaatgatcacactgaaacgaaatgaagattattacggaaaggttccgaatattgaaaccgttgtataccgtacagtgtcggatgagactacaaaggcaaccatgctccagtctggtgaggcggatcttgcatggctgaattccaactatgcttctcagttcaaggataaggacggatataattactgggagtttaccacagcagattaccgtggagctgccatggatatgagtacagatttctggaaggaaaacggagattccatcggcgttctgaattatgcgctggataaggagtccattattgcaggtgttcttgcaggacagggagaggcggcatacagcccgatccagagaaaccctctcggaacagataaggaagccaatatctactcctatgatctggacacctttgcaaagaagatggaagagctgggatggaaaaaaggtgatgatgggatctatgagagaaacggacagaaattccactttaccatccaggtacgtgattacgaagaagagcgtgtggatattgccaatgtcatgtctgatatgctgaagcaggctggtgtggaaatggaagtaaagcttgttaccaaatttgattgggatgcaggatacaatggatttcttgccggctatgcaacacagtttgacccggatatggcatatgtaaactttgtaaccgacgcaagtggaaacaacatgcattattccaatgcagatgtggataaatatcttgaggaaggccgtcacggtgagactgaggaagccagaaaagaagcatatagtgaattcgaaaaggcatatgccaaggcacctggaatccttctggttgcttatcttcagggagattatgtaggcgtttccggacttgacggactggataccacacgtgttctgggacatcattccgtaggtgttatgtggaatattgaagactggaccattacaaaataaggaaaagatcatgcaggaaaccgttttggaattaaaaaactattcggtaagctttgacacaccggacggcgaggtacaggccgtccgtaatgttgatctcacggtaaaaaaaggagagatactttgtatcgtaggtgagtccggatgtggaaaaaccgttatgtgccgtagcgtgatgaagcttctgccaccgaatgcacatgtaaaaagcggagagatcagtctctgcggagagaatatcacagcctataaaagaaaaaaaatggaaaagctgtgcggaagtaaggtaagcatggtgttccaggatcctatgctgacgctgaatccgacgatcccggttggcaaacagatcacagaggctattatcaaaaatcagaaagtatccagggatgaggcgaaaaaaagagctgtggaaatgctgaagctggtagggattccggatgcagaacagcgctatggcctgcagcctcattttttttccggaggaatgcgtcagcgttgtgtgctggctattgcactggcctgtgatccggaaatattatttgccgatgaggcgactacagcactggatgcaaccgtggaagcaaagattctggatctgcttcttgagctgagagaaaaaacagggatcagtattgtgttcatatctcatgatctgggagctgttgcaaggatcgcagacagagttgcagttatgtatgcaggaaagatcattgagatcgggacagcggaagaggtttattatgatccccggcatccttatacctggggacttctgtcttcactgcctgtatttgcaggtgaaaaaggggagctgaatccgatccccggaatgccgccctctcttttgaatcctccgccgggagatgcatttgccgttcgaaatccccaggcgctggcaatcgattatgaacagactcctccgatgtttaaagtcagtgatacgcattatgcagccacatggcttctggatgaaagagctccgaaaatagaaaagcccgccattttgaaggacagattacaggaaaacagcggccgtaaacagaaaccggataaaaaggaagcgtcatttttacagaaaacagaacagaaacaggcgcctgtactgatcgaagccagaaatctgaagcagcatttccgtatccgttccgattatacgatccatgcagtggatgatgtttccttcagtatccgggaaggtgagatcatggcactggtgggagagaccggctgcggaaaatccacgacagccagaacgcttgcaggaatctaccggcctacaggtggggagatcttttatcagggagcaagagtgccggataaaaaggatcctttcggaatgcggaagaaaatgcagactgagatccagatgatctttcaggattcgggcgctgcactgaatccccgaatgagcatacggcagatcatgctggagcctgtaaagatcagtcgcaggatccgtgacagagaaatgctggagaacaggcttcgggaaatcctgaaggagacaggactggatgaaagcattctgtcgaaaaagccgggagagctttccggcggacagagacagagagttgccataggaagaagccttctcatggaaccacgtcttatcattgcagatgaaccgatcgcatcgttggatatttctatccaggcacagatcgtcatgctttttaaaaagcttcagcaggaaaaaagattttcgtttctttttattgcccatgatctgtcaatggtacgttttttaagtgatacaaccggtgtgatgaaaaacggaaagctggtagaaatggcacctacaaaagagctttttgaaaatccgcagcatccttatacacagtccctgctttctgcgatccatatcccggatccgctggaagagaaaaaacggaggttgatcgagtatgaagagccacagtctcttggagagggctggaaagaattatccgcatgtcactgtgtgagaatataagaacatgatggaatacatatgcatgacaaaatggaatatgtaaaatccccccgccggggttgtggcagaacagccgtgttgttaaacttttgttattcgaaatactgagaaacaaagtgcggagaggaaaatatgggaaaatatataataaaacggttgctgcagctgatcccggtcctgatcgggatcacatttctttcttttgccatgatgcggcttgccggcggagatgcagtaacttatatgtatgaaaatgcaggctctgcagtatcccaggaggtcattgataatgcgaaggcagaatatggccttgataaaccattccttgtacaatatgctgcctggtttgcgggaatggtaaccggagatatgggagagagctatgtgtctcacagagatgtctatgaaacctttatttcaaagcttccggcaacgatgatgctgactctgtcatcgatccttcttacaattgttcttgcgatcccgttgggaatcctgtcagcagtaaagcacaacaaatgggtagattatctgataagatttttaagctttatcggcaattccatgccgaatttttttgctgccatggtcctgatgtattttctgtccatcaggctgggcgttttaccggtagtcacaaatacagatctcggacagagtattattctgccgacactgacactggcgatctccatggctgcaaaatataccagacaggtgcgtgccacggttctggaagaactgaataaggattatgtgaccggagcccgggcaagagggatccgcagtcgtgtgatcatctggaagagtgtaatgaaggcttccatgctgacgatcatcacactgctggctctgtccatcggcaatcttctgggaggaactgccattgtggaaaatatctttatgtgggatggtgtcggaaaactggcggtagatgcgatcaccatgcgtgactatccgatcatccaggcttatgtggcctggatggcggttatttatgttctggtaaatctggtgacagatattatttaccactatctggatccgagagtacgacttggaggtgacagagcatgagtggaaaaaataatatcacagtccggaagcagaaaatccggaaaaatcatacaaaagcaaagcttgtcttttttcttgtgctcacagcattgcttctgtttgtagcggcatttgcaaaatatctctgcccttatgatccttatgcccaggatctggcacttgcccagaaaccgccgggaccggagcatctactcgggacagaccgttatggaagagatatgctttcccgtgtgatcataggaagtacgaccagtatttatgcaacgctgctcctggttgcggtgatcactgtggcgggaacggctattggtattttctgtggctggaagggcggcaaagccgatactgttctgatgcgtatctccgatctgttcctggcttttccgggattggtatttgccctggcagtagcaggtgttctgggaggcggtatccagaatgcgatcattgccctggcagtgatcagctggccgaagtttgcgagacttgccagagggcttactctgactcagaaggactctgcatatcttatggcggcgaagctttccggaagcagtacaggaaagcttctgctcaaacatatccttcccaatatcgcaggccccatccttgttacgtcagttcttgatatcggaaccatgatgatggagctggcaggactttcctttctcgggcttggggtaaagcctccaatggcagaatggggaagtatgatcaacgatggaagaagtatgctgcagatttcaccgtggatggtacttgcgccgggaatggcgatttttattacagtaatgatctttaatcttttgggagatacgatccgggattatatggatccgaaggaacgaaacaggagaagaggataacaggcacttataaataagcataacacagaaagtgagagcggagattatgaagaaaaagattctggcagcagtgcttgcagcggcaatggtcatgagcatgacaggagtttcggcagcggcaaaaagcaaagaaaagagtgaaggaactacctttgtttacggaactaccggatatagtgaagaaatgggagatgcaggattaaaccctcacgacaattattccggatggagctgtcttcgttatggcgtaggagaaacactgtttaagtacaatgacaacatggaggtagagccatggcttgctacagactatgaatttacagacgataatacagtaaagatcacccttcgtgatggtgtgaaattttccagcggaagaaccatggacggagaagcggtaaaggaatgcctggaggatctgatcgcaaaccatgaccgtgcaccttacgatatgaagatcgacaagatcgaagcagatggaatgacagtaacgatccatacttccgaaccatgtccggcactgatcaattatctcggtgatccgtatggtgctatcattgatatggattatggtgtacagggagagggcggctctgcaaatgtggcaggaacaggcccttatgttgcaaaagaggtatctccaacagagattaagctggtaaaaaatgaggattactggggcggagatgtaaaggtagacaacgttatcgtaaaatccttctcagacggaagtgctctgacagcggcattgcagacaggcgatatacagggaacctatggacttcagtatgataactatgcgctttttgacggaaatccggactatcagatcagctctgtagcaacaagccgctgtttcttcggacaatttaatatggaatccgagctgatgcaggatcagaatgtgagaaaagccattgagatgggaatcgataaggacggcttctgcagtgtgatcatggagggacgaggtgttccggcagtgggagccttcccaagcagcttttcctatggaaacgatgcagtaaaggcaccgtcctatgatccggaagaggcgaaaaagcttctggaagaatccggatggacagatacggatggagatggctatgcagataaggacggaaagaagctgtccatcacatggctgacctatccaacccgtctggaacagcctaagcttgcagaatatgcacagtccactttaaaggacatcggaattgaggtcaatgttaacaatacagcagatcatgcgacgtatgcgaagaacggagaatttgatgtatatgtaagctcgcttacaacggcacctaccggtgatccggaatatttcttcacaagtacagttgtatctgacgctgccaaaaattatggcaaatacagcaattcggatcttgatgatatcgtagcgaagctgcatgagacctttgatacagatgagagaggtaagcttgctgtggaagcacagcagaccattctggatgatgatgcgtatttctttgtttctcatctgaatatgggacttgtgtcaaagtcaaatgtatcagggctgactgctcatccatgtgattattacgagatcacggcagatctggaagtgaaataagatggagtcattgttgaagcttgagcatgtgacgatctgctacaacggagagccggttgtacatgatgtggatctgaaactgaataaaggggagatcctgggggtggtaggcgaatccggaagcggaaaaagtaccatcatcaaggcaatcatgggacttctgggaaatgaaggcatggtgacagaaggggatatctggtacaaaggaaaaaatgtggtggatatgccggaaaaagaattacgcagacttctgggtcctgagatcgccatggtctttcaggattcaggagcagccctttgtcccatccgcaccgtgggcgatcagatctatgagagtatgcgggagcatgaaaggatcagccgtaaggaatgtgcggagcgtgccgtccggatgatggctaagattggcctcaaggatggggaacgtgttttgcaaagctatccctttgaattgtccggcggcatgaatcagcgtgtgggaatctgtatttccatgctgcagaatccgtcgcttcttctggcagatgagcctaccagcgctttggatgtaacagtgcagaaacaggtagttgaggaaatgttgctgatgcgtcaggagtatggaactgccatgatcgttgtcacacacaatattggtgtagtagaaaaaatggcagaccaggttctggtcctgaaaaacggagaagtgaaagaatacggaaaaacagctcagatcctgacagcctcgaaagattcttatacaaaagaacttatgagttcggtacttcgcctgaaacgtacaggcaccggaaatggaggcagatgatggcagaaaaaatcctggaagtgcagaatctgaaaaagacatttttatccgggaaaaaatccttcacagctgtggaagatgtgagcttttttctgaacgcaggagaagttcttggaatcgtaggggaatccggttccggaaaaagtacagtggcaaaaatgatcacccatctgacggatattacagatggaaagatttttttcatgggaaaagatatcacacatgtgaagggaaaagctctccgggaaacttaccgggaacttcagatggtttttcagacaccggcaggatcttttgatcccagatgtaccctcggggacggaatcggggaaagtctccggaatatggggataagtaagaaggaaaccaggaaccgtgtggaaaagcttctgcttacctgcggattgactccggaatatgcagatcggtatccccatcaggtcagcggaggggagtgccagagagcggctattgccagagccctggctgtggaacccagagtgctgatctgtgatgaagcaaccagcgccctggatgtgactgtgcagaaacagatcatggagctgcttcagaagttaaaaaaagaaaaccagctgtcctttctttttatctgccatgacctggcccttgtccagctgttctgcgaccgggtgatcgtgatgcatgacggacatgtggaagaggaagggacaccggaagagatcattgagcatccgaagacagagtatacggagcagctgatccggtcggtgctgtgataatgacagacaaaaacaaaagagcgaagccctcagtagtgcgaatactgagggcttttttgcaggttacacgttgacgcattttccctcacccgatataattaaaaaagaatcgaaaccggatgaaaacggaataaatatagaggagaccacgaaaaatggcagaaaatttacagatcagactggcagatcccggtgaggcggatcgtctggcagagatcgaggcaatctgttttccacctgcggaggcagcaagtcatgaggaagttgtgaagcgtatgggagcattcccggagaatttcgttgtagcagtaaaggatgagcagatcgtaggctttatcaacggaggaaccacagataaaccagtactcccggatgaattttatcatgatatcacgcttcacagaaaggacggggagatccagacggtattcggactgaatgtgatcccggaataccgtcatcaggggatcgcaggagagcttgtggaatatttcaaggagcttgcgaaagagcgcggaaaaaaagctctgatccttacctgcaaggagcatatgatcccattctatgagagccacggactgaagaagctgggtgtggcagattcctgtcatggcggagcaatctggtatgatatgcagatctggttctgagaaatgaagacagtaacagaagaaaaaagaagagtcagctgcagaaacaaaggtcagctgaataagaaaccagaggaaaaataaatgagaatacgaatgtacaatgtagggttcggggattgtttctgtatccgtgacagaaaaagcagcctgcttgtggatttcggggcagccaacagcaagatcgaagggcggccacggagagaggtctttgatgtgatcatctcagaccttaccactatccgcaaaaaaaatctgcttctgacacattttcatccggaccatgtttccggattgctttatatgatgcgttaccgaagagatgcctacgaatttgaaaagatctatcttccggatgtattttccggtccggaaatgaaatacacactggcgcttctgctccttgcggatgtgacaaaaaaggccagccttcccggaagacgtgtcagcctctttgcccttgcagaagctctttgcgccagaagggtaaagatcgaccttttatccagaggctcagagtttgaggggaaatatacagcgctctggccagatctcagggaagtcagccgggaaacggaggacgtatttaattccctgatcgagaatcatgaaaatgcaatgaccgagcttgtgaacattgcggaggaggtacgtcagctgttcctgtctatgacagaggagatgacggaagcagagcagaaatctgctccactgtctgaggcatctttggtggaagaggatacagaggaatccgagcgctctttgacaggacagacagagcctggtggggaaaacgaaggatatacgcaggagaagctggagcttataatggaagatataggcgcagcagctgaggatacagcagaggctccggaagaagccgaaaaagagaaagcacgttgccttaaaccggaaaagctggaaaagaaattccgtgaattacaggcaaccggagaatttcaggcacttctggaaagtgcggaaaaacaggggcattttctgcgtcagttccgccacaagatcagtctggcatttcagaataccggcgacggagagctgaatcttctgtttaccggagatgtacagccacagtacatgaggatgatcgcagaaaactatgatgggaggattccgcttcatgagcattactggtgtatcaaggtaccacatcatggtacggaatcccatttctttgatttcagcagcttctccccggagaatatgatgatccccaacggagcctactacgacaacagcaagaagaaatccaagaatcagcgcacttccatgcagtacggcggtttattttatattaatgacgcgcatatgtattgttccaactgtgactgctgtgacagctatgagaacggatgctcctgcagggagtatgatgtgatatcaccatcgtattataaagatatctgatcatgttacagatggatttctggtgagttatatacgatccggtcattcaggcagacaaagaagacggtaatttctttgtttgcgtttttgttaaaaaagacaggatgtacatgtggacagaggaaaagatgatacaggaggaaaaattttgaaacagatcgcagacctgcacatacattccagatattccatggcaaccagtaaagatggcacgccggagatgctggatctctgggcgcggaaaaaagggatcacactccttggaaccggagatatgacacatcccatctggcggcaggagctgaaggataagctgatccctgcggaacagggactgttccggctgaaagaggaatatgttttgccggaggcgtcacgctatcctggaaaagcacccaggttcgtactgtccggtgagatcagttccatctataaaaaaggcggaaaaaccaggaaggtgcacagcctgatcctgcttccgggattcaatgaggcagatgcttttgccgcaaggctggaaaagatcggaaatatccattcagacggacgtcctattttggggctgccctgtcatgatcttctggaaatgatgctggaggtcagtgaggagggtatctatatccccgcgcatatctggaccccacatttttctctgttcggggcgaagtccggatttgataccatagaagaatgctttgaagaactgacaccttacatccatgccctggagacaggactttcttcagatccggcgatgaactggcagatctcggcgctggatggctatcagctggtgtcccattcggatgcacattcaccgtcgaagctgggaagggaagcggatcttctggatatagagctttcctatcagggactttggaatgcagtgcagaaaggtaaggggcttgaagggacgattgaattttttccggaagaaggaaaatatcattttgacgggcatcggaagtgcggcgtgtgcctgagtccgaaagaggcagagaggtataacggtatttgcccggtctgcggaaagaagctgaccatgggtgtggatcacaggatcctgcagttatcagatcgtgacgagagttcagtggccatgccggaaagcggccgtccttatgaaagcctgatgccgctaccggaggtgatctccgcctgcgtgggattttccacggcaagcaaaaaagttcagggacagtacgaggcgctgcttgaaagactgggtgcggaatttaccatattgagagaggttccgccggaagatatccgaaaagccggcggagaagttctggcggaaggcatccggcggctccgtgcaggagaagtggtgcggaaaccgggatctgacggagaatatggaaaaatagaattgttttaaccgaatcaggtaagtcctctgcgggggtgcgaatatcggcttgatccaattaagaaaatttctgaaatggtgtgaaaagaagcagctgttaaatatttatgtattgtgaagagtattgccggtcatagcgtgaactgcaaaaggtaaaaggcgataatgataaaggattggagcaggatagagatcatgaaagaaaaaatcggcatcatatcagacactcacggccttctgcggccggaggtactggaaatcttaaaagactgcaaatacattcttcatgccggagatgtcaataaagacgagatcctggatgtactgcgttccatgggaaatctctatgtggtccgtggaaataatgataaagactgggcggaaaatctccgcaccagtctaagctttaccattggcggcgtgaaattttttatggtccataacaaaaaagacgctgcgtgggagctgggggacacacaggtggtcattttcggacatactcacaaatattttgagaagatgatcgatggcagactgtggctgaatccgggaagctgtggaagaagccgctttggcggagaggttaccatggcggtgatgactgtggaggatggcaaatatcaggtggaaaaaatcattttggcggaaaatttcaggaaataatcataaccctgtttatagatccttttatgcagatccgtttctgtagattactggaatacgctgatgcataaaaggattttttgtattttattggatacaatccttgtaattttggatttgtagcgtataattaaaaaacgtttaaaacaaaagtggtcttaccacttttgaaaaattcgtttgagcgcagaatttgaacgcagctgcgttcatgagtatgcagtaaagcaaaatgtgaatatgcgctttacatgaatcaggagggatgcaacatgaagcatgtgcagcagttcagcatcatcctgttgatttccgtcattggagaattactgaaaacttttcttccacttccggtaccggccagtgtctatggattgatcattatgctggtggctttgctcacaggtattctgaagctggatcaggtcaaaggtgcggcagattttctggttgagatcatgccggtgatgtttgtgccggctggtgcgggactgatcacagcctggagtactctgaaaccgatctgtgtaccggttctcatcatgacgtttatcagcacggtgatcgtaatggtcgtaacaggaaaagtaacacagggagtgatccgtatgggaaagagaggaactgaaaaatgatggaattcataaaaaactccgcatttttcggagcaatgataagtctgatcgcctatgagatcggtctgatcctgaaaaagaagtttaaaatggcaatctttaatccgcttttgatctcgatcatctgtgttatcggtgttcttttgatcttccatattgattatgatgattacaatgaaggtggaaaatatatcagctatctgctgaccccggcaacagtctgtctggcagtgcccctttatgagcagatccatctgctgaaaaaaaatctcaaggcagtggttgccgggatcttttccggaacgctggccgggctttgcagcattctgcttatggcgaaattgtttggctttgatcatcaggaatatgtcaccatgcttccgaagtctatcacaactgctatcggaatgggtgtttccgaggagcttggcggtatcgtgaccatcaccgttgccgtgatcatcatcacaggagttctgggaaatatgattgcagaggttgtctacaagatcgcaaagatcgaggagccgatcgcaagaggccttggacttggaacatctgcccatgccatcggaactgccaaagccatggagcttggcccggtagaaggagctatgagcagccttgccattgccgtagccggattgcttacggttgtaggagcgtctgtgtttgcgggaatgatgtaaaaggagatatcattggggatttcaaatgccctttcaaagtgttacattttacaagtctgtcgtttacggcaggctttttttgttgttcgttggtaatatcccgcgaagcgtgttactgagaacggagtgaacagcaacgttttttttattgtcatgggaaaaagggtgagaaataagttgcggtagtaatgtgataacatgtatactgtacttaaaaggttataagtgttttgcagaatatatataaacactcatgacaacaaaataatggaggagtgcatatgaaaagaaagatgacaagtgcattgtcactgttcctgactgcggcaatgcttggcaccagtgtgccttctgtggtactggcagaagatttcagccagcagccggacgtgcagtgggacagcgaagcggtggatgaaactgcagatccggaagagcaggatcagacagaagaagtaaccagtggtatttctgtttccgacaacaattcggaaaatagttcagaatacatgggaacgggagccggagatgattttacgtcggatgtaacagaagaaccggaagataagacagaggaatccggggaatcatcagaagaacaggatcaagatcagaatcagaatggtgcggcagatggggccgaagagatttctgaggaaacggaagaacttgcgtcaccggagactgaggagccggatcagctggaagaggagaagttatccgatgatcagctggacggagcggaggaactggtttcagcaggagaaagcagtgcgacggggatcgttgcttcgggaaattgcggaccgacacatgatatagggggaacaggagttgcaataaacaaagacggttccaatataacggatacagcaaaatggacgctggattcccagggaacattaacgatatctggaagtggagaaactacaagctatatgtggagctattccgatgggcttgagctgaaagaagtacagccctgggccgcttatgatgatcagatccggaaggtagtcataaaagaaggaatcacagagattggaaatttcaattttatgaaatgcaaaaatcttgagagtgtacagcttccaagttctttgaaaaaaatctgggaacgtgcgttctggaaatgcgaatcgctgaaagagataaagattccagacagtgttgaggttattgcaacgcgtgctttttcgtcctgcgaaaagttgaaatcggtacagctttccaaaaatcttacagggattgcggagggcttgttttataataccggattaacgaaagttattattccagaaggaataaaaagtatagatgacagagcttttggcgtgtgtgaggagctaaaagaagttaccctgccgaaaagtttgcaaacaattggatgtcagacatttgcatactgtgactcgctgacagctgttacattaccggatttactggaaactcttgatcaggaagctttttattcctgtaaaaacctgaaaactgtaaaatttggaaataatctgaaagaaatcggagtatgtgcatttgaaaattgcgactcactgaataatatcgtattgccaaattcgctgaaaactatcgctgaaagagctttttttggatgttcgtcactgacatctgttaaatttggcgacaacattacagaaataggtgaacgagctttgggcagcggcaggattaaggaactgatacttccaaggaatcttaaagaactgggagagtcggcaattaatacatcgtcttgtacaaagatcgttgtgtataagaatcttcagaaagtaggaaaatatgcactggcatcatttggcagctgcgctgtgcatggagaaagtttcaacggcgtttattatcctggaacagtagataaagtggacttttattatgaaggcaccaaagcacagtgggagaagatttcaaaagatacagaagtatttggcgattatgattgtagttattcctggccaagagtcccacattatcatagtgatcattgtatccgtttccactatggaaccacaaaatatcagagccagagccacaagatcacgtttaacaaaaatgcaaagaacgcaactctgaaaaccacctcaaaacaggtaaagaccaacagcaaatacggcacactgccaactccaacacgcagaggatattatttccttggctggtacaccaaggcatccggcggcagtaaggtaactgcgtctaaggtgtttaagctgacaaagaaccagacgctttatgcacactggacgaaggcggatcttggcaaagcaacggtgactttggcaaaaaacagctttacatggaatggaaaggcacagacaccggccgtaactgtgaaattccagggagcaaccctgaaaaaaggcacccattatacggtttcctgcatcaaaaacaaagagcctggaaccgcagtgctcacggtcaagggaaaaggtctttttggaaaaacaaagaagaccgtaaaatttacgatcacaaaagccacacagacgatcagtgccggtggaatgatctgcaaaccttcccagaagggaaaaaccgtgacactgaatgcagccgtaaagaacagtgatggcacaaagcttcacttttacagcaattccaaggctgtgcaggttgtgaataaggataaaaacaaactgaaactggctggggtgggagctgctgtgatcacgatcaaggccgatgagacgaagcactataaagcagcagttaaaaaagtaaatgtaatacagcagggcgcacagagcatccagctgaagcagcagagctttttgaaatatgataagacaaaaggtgtatatgtattaagtaaggagattttcagtcaggcactgcagatttctgtaaaaggtaatgcggcttattcctgttctgtggaaaacagcgcaaagacttccgcatggctggataagaatatgcgtcttactgcaagcggaaacggtatatttaccctgaatgtttccacgaaaacaagtgcggataagatttatccggctgcttccaaaaagttttatatttccataaaaggaatggcgaattccgcatctgcaaactggaattacaaagtggaaagtgacggcaagatcacgctccttaaatacatcggaacagcgacaacagtaaaagttccggatacgatcactctggattccagaaaatttaatgtaaaagctatcggagaatctgcttttgcaggaacgaaagtaaaaaaggtttccatttctgacaaatatatgaaatctatcggaaagagtgccttcaaaaactgcaaatccctgcaggaagtacgtcttggtacaggtatcacatccattggcgcaggagccttttacggctgcagtgcccttaagacaattgcgttccctgatggacttaaggtgatcgaggcggaacttatgaaaggctgcagcggactttccggagagatctatcttccgagatcgctgacaacgatccgtaagaatgcgtttgaaggctgtacaaagatcagtgagatcatgatctttacattcttaagttctgtggagagcaatgcatttaaaaactgcaacagcctgaagaaagtttatttctcaggagcaaaagtgagatggaatggtattaaatttgccgcaggaaatgagaaaattacaggcgcacagatcatctgtaatgcgggcggcggcaatacagcctatgaggttacggatatcacaaccgagatgcttttgcgacagtatccggagtatctgaaaaacgagggatacagcaagatcctgaatgatctgcagaatgactgtttttccattatgagcggacatacaagcggaaccttcagcgatgaatggtgggctgccctgaaatccgagatgcagcaggggcatgtagcactgatcaaagcagttctggaagacccgaaatttacagaagagaaggtgaacagaagcctggcactggaactggttgtggatactgccgagtactccatagatgaggatctaagcggaggaatccaggatgggcttcagagagcatataaagtgctgaaaaagtttaaatccggcggtgataagatctttaaagacggagataccatgaaaaaagctgcccaggagcttggcggaaccggatggatgacagaggaagaagccctgaagatgctgcagtatatgaatggatataaggagcttccgctgaaaccgggacagacaaaaccggatacagtgcagagatgggatcatgtgcagtctgtttttgacggagcggatattgccatcgatgcagtggacttcctgatgacatttctgactgtccaggcagtgggacagaagctcgtagatcgtgtgatcagtcagcttccgtcagacagcggcctgtataatggtgttgtgcagctgaaacagtatatgaaccagccgatgtccatacttatgaaggatttcctggcagaccaggttgaaaagaatgcgatctggctctttgataagaaagcacttgccccaatgtgggaaaacagtgtcaatcttgcggaagttgtaggagtggcagataagatctgcaaagccgtagcgtttatgatggactgcccgacgctggaagactacaataaggcatggttctctttaaataatgcgatggtgcttcggttacaggtggacagactgagagcacagctgatcgcggcaaagaatgccgggacagaaaatatacagctggaagacgattataaactgatgatgaagatgtatctgagctgcctgaaaaaaacaggtcgctatgtggcaaaaaccatggcagatccgtatgtcctgaatgcgaaatttgcccggtttgattcttcacttacctatgagaattatattctgacctgtaagtggggactggctgacagtggtgtgctgaaataaatagcggttgcggataaaaaaagaatgctgtttgtcggagtgaccggcaggcagcattctttttttgtggatcttaaagacgaacatatttttgtataaaataaacaaatgttcggaaaaaccatatttgtaccgttttattggactaaaaatgagctataatgcaaacatacagaaaatatgtttggaaaatatgttcgataaatcgtgagacgaacataggacagggaggatggatcttatgtggaatacagagagcagcaggaaggcagtattggcagaaggaagatatgtggaagctgagaacggacattgcggcagacagaagctttcttcaggaatggcaatggtactgggcgcacttcttacaatggagatcatgcttggcggggcgatgctgtttaattttgatttccgcggagcagatatcgttgctgttgtattgtcattcatggtattatattttgcagtggtagcatcactgacagacaagtagcagaacggaggagaaaggatgccaagggtctttaaccagaagattaaaattttatatctgatgcgcatttttctggagcagacggacgaagagcatccgatgtctgtgaaggagctgatctcctatctgaatagtctggggatcagtgcagagcgtaaaactgtctatgatgatattgaaaccctgcggaattttggaatggatatcctgaaccggcgggagcacccggccggtttttatcttgccagtcgggaatttgagcttccggagctgagacttctggtggatgcagtacagtcctccagatgtatcaccaatgggaaatcccgacagctgatcaggaagctggagagccttgccagtgtttatgagtccagacagctgcggcgacagggatttgcagagaaccgtatccggactataaacgagaatgtgtattacagtattgatatgatccagcgtgcattaactgaggacaggcagatttcttttcaatattgtgaatggactgtggagaagaagctgcgtccggagaatgagggggaacgatattcggtcagtccctggggacttgtatggcagaatgaggagtattatctgatcacttacgacgagaagtgtggaagggttaagcagtatcaggtagataagctccagcagatccgtatagagaaggaagtgcgatgcggcagagaattttttgaaaattatgatataggggagctgacatccaggaccttcgggatgtttggcggaaaagagaaaaccatatgtctggaagcacataaccgcttggtcggggtggtgctggatcggtttggcagagatattatgatacacaggaaggatcctgaacatttcaaaacactggttcgtgtaaatatcagtgaccagttctttggctggatagccagtcttggcccggatgcggtgatcgtgtcaccggatgaggttcgcgataagtaccgggaatttcttgagaaaagtctttctaattacaaatgataaatatatgataaagaaaatctgtatataataaagattcaggaaaattcactcctgagtctgcaggttttcaacagaaataatatataaaaaaataaatgaaaacagacaaaaatgagaaaaatcatataatagctgcatctgaaatataaaaataatatagatagcatatgtaaaaaagataatagacatcgcgatgcttaagtgctataatgctttcgaatcttaggagggaataaattttgccatttcaggcagattacggacggtgaagatatgactgtaaaagcaagaatgctgaagcttctggagcagcacgagaatgaactgatatccggagaggcggcagcagcagaactaaactgcacacgggcagccatctggaaagctgtgaaatcccttcgtgaagagggatataccatagaagctggaccaaacaaaggctatgtgcttcgaggaggcagccgtttatcggaagaaggaatacggctttacctcgatcatccggatgtccctgtaaaaatatacagagaactggattctacaaaccgggcagccaaggaggctgcattttcaggagaagcaggtcatggtgcactgatactggcgcgcagacagaaaagcggaagaggccgaagaggccgaagtttttattctcctgaaaatgcaggactttatatgagtatcgttctaagacctgaccgaactctgaaggaaggactcctgatcactacatctgcggcaactgcagtgtgccgtgcagtgaagaaaatctgcgggatcgaccttgggatcaaatgggtcaatgatctgtatcttcataataagaaagtgtgtgggatactgacagaggctgttacagactttgaaagcgggaacattgagtttgcagttgtaggaattggtttgaatctgtatatgccggaagatgggtttcctgaagatatacaggaaacggctggagcattatttgaaaacaggaaggacgcagagcatataaactgcagtattcttgtggcggagatcgtcaatcagcttctcatggaagtggagactccgggactttccagagaatatacagaaaataatatcattcctggaaacatgatcgtgatcacagacggacagtgtacaagggaagcttatgcagaatccatagcaccagatggaaggcttcttgtgagagaacaggatggttcagaaaccctgctttcttatggagaagtatctgtacgcaggaagtcggatcaaggttaattgaaatgaattgtatattttgtataaaaaacagattcttttttgtacaaaacaggcaaaaataatattgacattctggaaatgcggagtaaaataaagtcaactacaaggcgtggtcataccaattataaaaagatacgatcagcgccaagagaaaaggagggagaaaaacgggagatttatcaagtacactggcagaagaactaaacagtaagacagcctttaccattccggcgtttggtggaataccaattgcagaatgcgtggtagtcacatgggtcatcatggcggttcttgtgattctgtctctgatcttagttcggaatctcagtgtggaaaatccgggtaagaagcagctgcttctggagaccggggtaagttttcttcaggatttcttcatgggtatccttggagaagaaggcaaacagtatgtgccttatttgatgtcaaccgtaatttacatcggaatagccaatatcgcaggcgtatttggttttacaccaccaacgaaggatatgaatgttaccattgcgctggcgctgatgagcattattctgatcgagtatgcaggctttcataaaaggggactgaagggtttcctgaaaagctttgcggagccggttccgatcatgcttccgatcaacgttctggaagttgcgatcagacctacatctctctgcatgcggttgttcggtaatgttctgggaagcttcgtagttatgaagctgctggagtttgtttgtccggccattcttcccataccattcagcctgtattttgatttcttcgacggattcatacaggcgtatgtatttgtattcttaacatccttgttcattaaggaagcaattgagtagtgaagcggaagatccgcttgatctaaaaatgaaaaaattgtattttacaggaggaaaaaactatgttaatcgcaattggtgcagctatcgcagttcttacaggtattggagcaggtattggtatcggtcttgcaacatctaaagcagtagaagctatcgcaagacagccagaggcagagagcaagatcagtaaagcacttcttcttggatgtgctcttgcagaggcaacagctatttacggtttcgtaatcggtcttctgatcatcatcatgcttggctaataggtaaagacgagatactaattcaggattaagagaggcaggtggaccaggtgattaaaattgatatcaaccttgtctttactattataaacctgatcgttctttatcttttaatgaagaagttccttttcggcccgatcattggtgttatggagaagagaaaagctatgatcgatgagcagtttgcttcagcagagaagacaaccactgaagcaaaccagctgaaaggacagtatgaggatgcactgaaatctgcgaaggaggaatccttcagtattgtagagcaggctaaggacgaggcaaaagtacaggcagacagcatcgtgaagagagctaatgatcaggctggtcagattcttgagaaagcaagaagagatatcagcactgagcaggaaactgctatgaaagcgatggaaggcaaagtggctgagctggcaatggatgcagcatccagaatcatgggaaaaaagaacgacgaagcacaggatatgtccctatatgaccagtttttagaaggagcaggtgatcctcatgacagagacgtccattaattatgcaaaagcattatacggtctttctgtcccgggggaggcaatctgcgaaacaggaaggatttttaagaatacacctgagataggtaagatgcttgaaaatccacttgtttccctcaaagaaaaagaacaggtaatagagcgggtttttccgcaggaaatgaagagttttcttaaagtaacgtgtaagtatcagaagattgacagaatcggagagatccttgaagcttatgatgcttacagccgggaacagaaaggaattctcaaggcagagcttctttatgtaacacgtcctgccgaagagcaggaaaataagatgaaggagtttctccgtagccagttttctgccagagaagtggaacttacccttacagaggataaaagccttgtaggtggatttgttctcagggcaggagatcgtgagtacgactggagcctcatcggacgttataagaaactgaaacagaaattaacccggaggtgaaattgaattgggtgcaataaatccagatgaaatcatttcgattctcaaggaagaaataaagaactatgacgaaatcagcaaggaccaggaagtaggcactgtcatctccgtgggagatggtatcgcaactgtttatggcatcgatcatgccatgtacggtgaggtcgtgaccttcgagaatggtctgaaaggtatggtacaggatgtccgtgccaacagcatgggatgtattcttttcggaaaggatacaggaatcaaggaaggcaccaaggttgccagaactggcaagcaggcaggtattccggtaggggataaatttatcggaagaatcgtgaacgcacttggtgagcctattgatggaaagggagagatccaggcagaggaataccgcccgatcgagaacccggctcctggaatcatcgaccgtaagtctgtaactgtacctctggaaacaggaatcctttccattgattccatgttcccgatcggccgtggacagcgagagctgatcatcggcgacagacagacaggtaaaacatccatcgcaaccgatacgatcatcaaccagaaaggtaaggatgtgatctgtatctatgttgctatcggacagaaagcttctaccgttgcaaaggtagtttccaatcttgaaaaatacggtgcaatggagtatacaaccgtattctccgcaacagccagcgactgtgcaccgcttcagtatattgctccttatgctggtactgctcttgcagagtatttcatgtatcagggtaaagacgtactgattgtatatgatgatctttccaagcatgcagtggcatatcgtgcattgtcacttctgcttgagcgttctccgggacgtgaggcatatcctggtgacgtattctatcttcattccagacttctggagcgttccagccgtctgagtgaagaggcaggcggcggatccattacggcacttccgatcatcgagacacaggccggtgatgtatctgcatacattcctacaaacgtaatttccattacagatggtcagatcttcctggaaagtgatctgttcttctcaggtatgcgtccggcagtcaatgttggtctttccgtatcccgtgttggtggtgctgcacagaccaaggctatgaagaaagcttccggtagtgtacgtatcgacctggcacagtacagagagatggaagtgttcacccagttcagttcagatctggatgaggctacaactgcacagctgaaatacggaagctgtctgatggagcttctgaaacagccgctctgcagcccgttaagtcttcatcagcaggtaattactctctgcgttgcgactcacaagctgatggtagatgtagaaaagaaagagatcaagaaatatcagcaggatcttctggagtactttgataatgtatatcctgagatcggcaaagagatcgagactacaaagcagctctctgatgagcttgtagagaaaatcgtaaaggcggcagaagaattcagagataagagcaggtaggtgttgatatggcaaatgcaaaagaaatacagactcgtatgaaaagcattcaggacaccatgaagatcaccaatgcgatgtacatgatttcttcttccaagatgcagaaggccaagaagatcctgcaggacacggaaccatatttctataatatgcaggctgccattgccaggattctccgtcatatgccggacatccagcatcctttcttcagtgagcgtcatcttgttccgaaggatgaaagaaaggtaggtaccattgtcattacaggtgataaaggtatggctggtgcatacaatcataatgtacagaaaatgacagaagatttcatggaagaggtaccgggacatcacaagctgtatgtccttggtatggtagggcgtcagtatttcggcaagagagatgtggatatggacggcggttttcattataccgtgcagaagccgactatgcacagagcacgccttatcacggaagagatcgtacgggcatttcttgaaagagagctggatgaaattcacattgtctatacacagatgctgaatgcgatggcaatggaaaatgtgaatatgcagcttttaccgctgaaaaaggctgattttaaggtgggtcagatcccggcagatatttatcaggaggagatcgtgttatctccgtctgcagatgtacttctggatactatgatccccaactatcttacaggtgtgatctatggatgtcttgtagaggcatatgccagtgagaacagtgcgagaatgacagcaatgcagtcctctacagatagtgcaaaggcgatgctgaaggatctttccattcagtataatcgtgcacgtcaggctgcgatcacccaggagatcacagaggttatcagcggtgctaaagcacaaaaaaggaagtgatgactatgaataaaggtaagatcgtacaggttatgggacctgttgtagacgttgtttttgaagacggacagcttccggatatcaaggatgcccttgaagtcgagaacaacggtaagagatgcgttatggaggtgtcccagcaccttggaaataatatcgtacgctgcatcatgctgggagccagcgagggcctgcagcgagacagagaagtaacagctaccggaagcggtatcaaggttccggttggagataaaacacttggtcgtctgttcaacgttcttggagataccgtagatggcggtgattccctggacggtgaggagcattgggtcatccatcgtgatccgccttcatttgaggagcagaaaccggcagttgagatcctggaaacaggtatcaaggttatcgatcttcttgctccatatgcaaaaggtggtaagatcggtctgttcggtggtgccggtgttggtaagacagtccttatccaggagctgatccagaatatcgctaccgagcatggtggatattctattttcaccggtgtcggtgagcgttcccgtgagggtaatgacctttggacagagatgaaggaatccggtgttcttgaaaagacagccttagtgttcggacagatgaacgagccgcctggagcacgtatgcgtgttgctgagacaggacttaccatggcagagtatttccgtgatcaggagcacagagatgtacttcttttcattgataatatcttccgttttgtacaggcaggatctgaggtttccgctctgcttggacgtatgccgtccgcagtaggatatcagcctacactggcaactgagatgggtgagcttcaggagaggatcgcatctaccaaggaaggttctgttacatctgtacaggcagtatatgtaccggccgatgacttaactgacccggctccggcaacaacatttgcccatctggatgcaacaaccgttctttcccgtaagatcgttgagcagggtatttatccggccgtagatccgcttgagtctacttcccgtatcctggaggcagatattgttggtgaggaacattacgaggttgcacgtagagtacaggagatccttcagaaatataaagaacttcaggacatcattgctattcttggtatggaggagctctcagaggaagataagcagacagtattccgtgcaagaaagatccagaagttcctttcccagccgttccatgtagctgagaacttcaccggtatcaaaggtaaatatgtacctctgaaagagacgatccgcggatttaaggcgatcattgacggcgagatggatgattatccggagaacgcattctttaatgttggaaccattgatgatgtaattgcaaaagcaaaagccgaggagaaccggcagtaaggagcagctatgagtgagacatttggcctggaaatatatgccagcaataaactggcttatgcaggacgtgctcagaagcttattatcccggcagtggatggtgagcagggatttcttgcccatcatgcgaatgttgtagctgccatcattcccggtgagatgcgttttgaggatgctgacggtaatgagtatgtgtttgctgtgagcagcggatttgttgagatgatcaataaccgtgccaagctgttctgcctcagcgtagagagtccggacgagattgatatccgccgtgctcaggaagcaaaggaacgtgcagaagagcagcttcgtcagaaacagagcatccaggagtatcatatgaaccagatggcacttgcgagagcgatgacacgtcttaaagtaacacataagcagtaaatttaaatcatataaaaagatccattgtcaggaaactggcagtggatcttttttttctctgttattttgtggatgaagcaggatcagattcggtattttccggatcagtaatggaagaagctgtatctttgtctgagttatcagaagtatgaacaggcttttctgtcagctgctgatatggacgatagggttcccagtaatgttcatcttttgtttcggtttcctgtttcagtttctttttctgctgagtaagaagataaatacctgcagcaatgatacctgcagcaatgacgatctgcggaaggctgttgcagatattgtatacatagtcggccatattattcggtacaatgaagtacagaagacttgtgaaacgactccacaggatgcagataccaaacaggatcagaacccatgcagctgcactctgatgcttttgtaagaattttcccatatcaccggaaaactgatccatgtgaagaatgtaattatcctctacagagtagaattcttcttctgacagggatttcagattatggacattaaaaaaactatagaaccatatcaccgggagaaacatggccagccatccaagaccggttatggatgccagtgcgatcgatccccaaaacagcagcataatgctaagtccctgttttttaaatcccatgtacatttccccggcaccggggatcagggaaaagataaatacccagaaaccatgtttttgttttttcataaatttacttgcctccgtttataattttattcgtaagatcgttcagattattactgatcttctgagaatgttcactgagctgggaacctacctgcatggaaagctggtttaggccggaaccaatgtcaagggatgaagaaatcttaacttttgtttccggtgaaggatgaagagccgtaaaatctgtctgagatacagaaaaaagcatgatcagcgcaacacccatgcctacggcagtccgtaagcctgcacagagaagcttcatccaataagcagtttcatgtatttttctggaagcctgaacttccggagaagctgcttttttcagaatttcatcctgcagataggatggagcatactcagaagcggcatcctcattctgaagaagttcatccagacagaagtcacattgctccatatgctccagaaaatggatcatttcatccgtattcatggttccgtcctggaatttctgtaattcatcctgtggtatgtgcatctaatcactcctttccagcagtgctttcagcatagatctggaccggtagatctgcgtctggactgttttgatatttttattctgcgcttttgcaatttctgcggcggttttttcttcgcagaaatgatcaagggcaacctccctgtaggggcttttcagcgctgaacataaatgccggatccgatccttgaaatctttgtccagaaatgcctcctccggggaaaactctttatcatggagctgttcaaaataggtgtcctctgtgggaatggtacgtctgccggctgctttcagatgatccagacattttctgactgcgatcttgctgagccaggctttttcgtaggtgccatcaaaacgggagagatttttgtaggcggaaagaaaaacatcctgtgtcagatcctcggcgtcaaagggattgcccaccgatttcagacaaatggaaaatattaagttttggtatgtatgtatcagatattccagatattcttcccgtgtaatgcaatcagctcccttctcttcccgcttcatttattataacgcggaacctgaaggaaagccttcagcttttatagaaaaatatgtaaatcattggataaatgccgtttttatatagcggggagagaaaatttggtctatactataagtcgtcaaagcagagatgcagaaaggatgagacaaatgacagagacgaaacgtttatattatgaagatgtatataaaaaagaatttacagccaaagtcctggagtgcagagaagcaaaaaaaggttttcatatcattctggatgagagcgctttttacccggagggcggcggacagccaagcgataccggatatctcaacgatgtgaaagtaaaggaagtgcatgaaaaggagggagaacttcttcattatacagatcagccgatggaagccggaacagaagtacagggatgcatcgactgggcaagaagatttgatctgatgcagcagcattctggtgagcatatggtgagcggactgatccacgaggcttacggatacgataatgtaggctttcatatgggaagcgataccattaccatagatctgaatggcccgttggatgaggcgcagcttgctgagatcgagcggaaaacaaaccaaaagatatgggaagatacgcagataaagatcatatatcctacagcggaggaactggaaaagatcgattatcgaagcaaaaaagagcttaccggtcaggtgcggatcgtagaatttccaggggtggatatctgtgcatgctgcggaactcatgtgacacataccggagagatcggaatggtgaagctactttccgtggaaaaatttcgtgaaggtgtccgtattgagatgatctgcggaaaacgtgtgctggattatctgaacatggtcaatgaccagaaccaccagatttctgtaaagctttccgcaaaaatggataagactgcgcaggcagtggaacgccttcaggaagagaatttccgactgaaaggacaggttggtcagctggtagacgacatgtgccggaaagaggcagagcgttatgcaggaagcggaagcgttctcatctttatggatggaatggatgcagacagtgtgcggaagcttgcagacgccgtgacacagacctgccagggctgctgtgcggtattttccggaaatgcagacggaagctacaagtatgcaatgggcgaaaaagatggcgatctccgtcagtttacaaaagagatgaatgcgaaattaaacggacgcggaggcggaaagccgttctttgtacagggatcggtgcaggcatctgagaaagagatccgaaacttttttgaacagtgatgaaaatgtttggggaatgtcatgcacatatatttctcaatggctatgattaccggaaagccgttgagacacagaaaaacgggccccgggatacactgatccgtgctcattttgaggaataccggaaaagaggaatccgttttgtgagagacggaggagatcattacggtgtgtcaaaacgggctgccagattggccccggaatatgaaattgactatcgcacaccggtttttgccatttataaagagggtcattacgggaagatcgttggaaaaagcttttcagacatgaaggaatatcacagaagagttctggaagctgccgctgaaggggcggattttatcaagatcatgactacagggcttctggattttgcagatcacgggaaaattacgggaacgccgctttcagcaacggatgtgaaagaaatggtacatattgctcatgaagagggatttgccgtgatgagccatacgaatggatgctatggcgtacaggcagcagtggaggctggtgttgacagtattgagcatgggaactatatggatgatgagacgatttccatgctggcagacagcgaaagcgtgtgggttccgacacttgtaactgtgcggaatcttaaaggatgcggcagatttgaagatacgatccttgcatctattataaagacaggcgagcagaatctgaagaaagcttttgaaaagaaggttcatgtggcagtaggaagcgatgccggtgcatatcaggttcttcacggccagggtgtacaggatgaaagcagagctttttttgatatactgggtgatacgcaggcagtacgaagctggatggaagatggagaaaaaaggatccgtaccatcttctgtcacgggtcttcgaatttaatacaggtataaatattggaggtgcgtgatttcgcagggttgaaagtaacccggagatcggcaccttcttccattccgcttgaggaaaggtccggaacgttttcacggctgcagaggatctttacgccgtcgtatgtctggagcagcacggtattggcggttgtgcccaggatcgtgccggttacagtagaagtaatgttgcgtactgaaagtatgtccggatcctccccggtgattccacggatcttcatgccgctggtggattcaccattaaatttaccggtatagataatgtttacataagatcccggagccattcctcctttgaaatatacaggaaccgaggaaagtgaaacagtcagttccgatcctgtggtctgcggaatgacagtcattgtgccggtgctgacatttacgatctttgcacggagatgctgctctttttttttcggttcaggggaaggcgtaggagttgctgcaggtactttcagtggatccgtatcggagacactgatcacttttgtgaaactgccgtcatactgcttgtcacccacgagtgtttcgttgatgaatttaccgcgaaaatggacatagacccacttgccggccttgatgccttttttgtagtattgtctgacaccggtgacagggaaggttacggtatttcccttttctgtaactatcacaagggcattggaggtgagtgatttcactttgccctttaaagtgcggtcctccagaggagtttcattatgatatttgtcggttattttgatgggggaaatggcgctgatatctgttccggaaagctgtccctggtagatcacactgacctgatcactggatacaacgccgtatttgcattcaagccttgtctgggaaacatcaaatacataggtttctccattgctggaaatcgtcaggtgtgtaccgtcaaaatccagcagtgtgccggtaagctcatccatataaacacgttcttccgtggaaggctcctgatcttcctgttctgtggaatctgaagcagtaacgtctgaaattttatcctgaagagaaataatatgatcatcgatctgatcattgctgcagcctcccgcaaaaagggaaaggccgagaatcatacatgcagcagacagttttttcatttgtgtcctccgacccgggataacggtcagtcctgtttatctgtaagatcatgggtttccgacgccggtataaagtcaaatatctggcggaaagaatcccattgctcacggctgtcgattccatggttgatcagacccgtgcattcagtacaggcattggtatccaaataattatcgtaataaatatgatagggattttgggtgtttttttcctgcggatcgttcatcggatcagtctccttattgattgataaggatcagtatatgaaggcaggaaagattttatacatattaagggtattatagcaaaaagattttttgatttctacagggatttacggaaaatccatgcatttactgaaaacgtgttcctacaggctgaacacggaaccagtaggtataggaatactgaaatccaagagagctgtaaagcttttctgcggaagtattgttttttaccacctgaagataagcgtggctggcgcctctttttttgccctcattgagaagaccggtacagatctgacgggcatatcctctgcggcgataatcttcacgcacatgaatggcatagataccgatgtagtcgcgatccaggattccaagacctgtggcaatgatctcgccgttttttgttatggaagcgcagacagtttccttaagaatggcacggtacatggaaggaacgacgcttcgatggatcggatttgtagttcttttcaagtcaaaaaggctgtggatccagaaatccggaatttcattggaaaaaagcacatcggtgacaggcgcatccagaacggcattgtccaggtctacagtcataacatttgttatgtgctgaacggaatagcccctgttttccagcatatagtcaaaatccggggatacaagggggctgatcttaaagatcgcaggagttcccagacgcttatagacctgttcgcagtaggggattttttcgcgccatggaagtgtggaggttccgaactgttccacactgttggtcctgtgcgtatagaaataagaaaaacgtaagatccatccgtcataaagttccattttatgggaaggccatgcgttcagtgacatatcttcgatttttttgatcgttgtttccatagtattacctttctgatatgatcaatttataaagtttatctgccaggatccgatgcccctgtggtgtgagatggataccgtcagaagttattgatgcaggcccggaccgtgcagcttcctgatccagatcgttctgcagcgggagaaaaacggcgccatgatcctgactgatctttttaatatgcatggacatctgtgaaagaaggggagcccaggaagcgtagcagcgtggccatggaaaaacaaagggttccaggaaatagagctttcgtctccgggagtttgtgcaggatagcttttttgcaaggagctcataacgggtaacaaatttgttcatcagatcctgctgttgtgcagatgaacggcgggtgttcatcatgatccccacatcattgatcccgatcaggacggtaacaatatccggatcagagctttccagccagaaatctgtgttctgaagaagccgttccagggtgaaaccatcaatacctctgttttcaatggaaaatcggtgatctgtgttatgaagcagacaggagagctgcttcacatatccttttccaagaggatctgcggagaaaagccgtccgcaatctgtgatactgtctccgagacacaaaatgcgagtcatccaattccttctttctgttataccgggcggatcattatccgcagtcgattattttcgtattggtgctttgatagtagcacttacaccagcagtggtcaagcgtacgaaataccggaaaatgggtaaaaaacgaataaacgtgaaaaacatgaaaatttttttaaaaaattaaaaaaagtacttgcattttgaaagaaagtgttatatactaacgaagtcggttgagggaaacaacaaaaaacgaaatcaaacgacagaaacaaaagaatatggccagttggtcaaggggctaagacgccgccctctcacggcggaaacacgggttcgattcccgtactggctattaactgaaagcaatcagaacatgtttctggttgcttttttgtttatgatcacaaatggggattttgggaggttttactatgatcattgataatgtgtatgtttttacatcggacaaagcatttgtaaaaggcgggattatcctggatggggataagatccgacaggtttatgaagaaaaggatgcgccgcagcttaacggggatgttctggacggaaaaggctgctacgccattccgggactgatcgatctgcattttcatggatgcaaaggagatgatttctgcgacggagacaaggctgcgatcggaaggatcgcggaatatgaggcatcggtaggagttacagcgattgcaccggctactatgactttaccggtagaggaactggagcagatcctccatacagctgcagaatataaaaaagaaacaaaggactgccgtaaggcggattttctggggatcaatatggaagggccttttatcagcccggcgaaaaaaggggcacaggacgcgaggaatatcctgccatgtaatgtggaaatctgtgaccgttttttaaaggcctcggaaggtctggtaaaatttatagggattgcacctgaagaaagtgagcatgcagcagaatttatccgggaagttcatgaaagggtcaatgtttctctggcacataccaatgcagattacgatacagcaatggaagcatgcagagcaggggcaaaccatgcagtccatctgtataacgcaatgcctgcgtttacgcatcgtgcaccaggtgtcgtaggggctgtttttgataataaggatgttatggcagagatcatctgtgacgggatccatatccatccgtctgttgttcgagctacctttcagatgatgggagctgacaggatgatcctgatcagcgacagtatgagagctaccggtatgccggacggccagtatacactgggcggactggatgttaaggttgtgggaagacttgccacgctggtatctgacggtgcgatcgcaggatctgccacaaatctgatggattgtatgcgtacagttgttaaaaagatggatcttccgctggaaacagccgtggcctgcgcgactataaatccggccagaagccttggggtggaagaacagtacggatctctggaagcaggtaaaaaagctcatgtggtactgctggatcgtgatctggaactgaaagcagtgatcaaggacggagtaaagatccgataagctcatagaagataaagcgataaaaaataaaaagataaaaagaatttcaggagcagatgacagcaaaattcgtgtcagaatttgtcgaacgaaaatgctggacaaaatgctcctgaaattctataattaatttcaccagagatcttctggtatcgatcaccgccaggtcaggcgggaaatcccatttttatcataactgaataaacatatattttaagaaggaaagggggcgtgtatgtttctttatggagaattatccgtggtgatatctgcgatggcggtctggatggattttaaagatgcatctgtagacaatggatggatccttttttcttttatgatcggtttcctgatccagatcacagaaaacgggccgaaaggtggagtgatctttctggcaggagtggccgtgccggtgcttcttttgggaatccttttcatattccatatgatcggcgccggagatatcaagcttctgtgcgcacttggcgggatcatggggccgcggacagttatggaatgtattgtttattctctgcttgcaggtgcaggcatttctctggcaattcttatttctacaggcggtatccgccgacgattcctttatttatatcagtatatgaatgagttttactgtaccggtgagatacgtccttattacagaaaggggatgagctttccggagaactttcattttacggtacccatatttttgagtgcggtgctttatgcaggaggtgtgtattgaagaaaaacatatttgcggtctgtgatctggaggtggattatgctttcaattttatggattatctgaaccagaaaaagaatcttccgtttgagatccaggcatttaccacggcggaaagtctcattgcctacggaaaagaaaatcatattgagttgctgctgatttccgataaagcaatgcgaaaagaagtccgtgaccttggtatcggaaagatcatcattctttcagagggtgtgcatcctccggaactggatcagtattcaagtgtgtataaatatcaatcttcctcagatgtgataagggaggtgatggcttgctatggagaagagaagtctcttgatccggtaacttttcctgtgttgaaaaagacaatggagatcatcggtgttttttctcctcttggcagatgtctgaagacatcctttgcacttgcgttgggacagatactggcgaaagaacgtgccgttctttatctgaatctggaatcctattctggttttgaggaacttcttgggaaaaaatttccggctaatctgagtgatctgttttattatgttcgccagggaaatgaaaacctgatccatagaatgaacggaatgatccagacagtaaacaatctggattttataccgcctgtaagaacaccttcagatatccggaccgtggactgggaagactgggagcggctgttgcaggagatcgtacttcacagttcctatgaagtgctgatcctggatatgggagaaaatggagatgaggatttccgacttctggaaatgtgcagaaaaatctatatgccggttttgaatgacacactttctgtctgtaaggtgacacaattcgaaaatcttctgcgtatctggaataaagaaaagattctggaaaaaacagaaaaggtgcatctgccctttcatatggataggatctcttctgacgcttacgtagaacagctggtctggagtgaactgggagattatatccgtgaacttttgagaaaggagcggtcatgaacagagaaaaattccgggaaatgtatgatctgctcatggaacagctggatgtttccagagagctgtccgatgatgagatcctgggggtgatcgatgaactgatattaactcaggcaagggaactgtttctttcactgaaggagaaagtagagctcagacaggagctgttctgttctgtgcgcaagctggatgttctgcaggaactgatcgatgatgaaagtgttacggagatcatggtaaatggtccggatcatatttttgtggaacgtggaggaaaactgaccagatggaataaggtcttcacgtcagaagagaagctggaggatgtgatccagcagatcgtagggcgctgtaaccgggttgtcaacgagtccatgcccattgtagatgcaaggctggaaaacggagcacgtgtgaatgcagtggtttatccggttgctctgaatggtccgatcctgacgatccgtcgttttccggatgatcctatcacaatggaaaaactgatcgcttttggaagcatcaccgaagaatgtgcacagtttttaaaaaaacttgttcaggcaagatattctattgtgatcggtggaggtacaggcagtggaaaaacaacattccttggagctgttacagaatatattccaaaagatgagcgcctgatcaccattgaagataatgcggagcttaagatccggggaattgataacctggtatgtctggaggcaaaaatggccaatatggcgggcgcggtgtcagtaacgatccgagatctgatccggtcagcccttcgaatgaggccggacaggataattgtaggggaagtccgtggaggagaggcagtggatatgctgcagagccttatatgtactatataataattatatatataacgtatataaggatggaaaatatagattagagggaggggcataggaacgatatgaacattaagtataggttattgtgtaaaaggttaatagaggaaaggaagagagtaggtgtcattcaatattataatgtactgttcataatggagttagtgtcagataaagacatatgggctttagaacagtggatgaatggtataaataacatatatatgaaagatatacataattggtgtagaatacattttgttaaatatcacactgtatttgtttacaggaaagagtatccggtaaaagcaaatatttggaatgggtattcatatataaggtggcggatggagcggttgatgaatttgggataagataaaatagtgattgcatgaaagagagccttaaagcagggtgttcttttgaaagtatggatagaattaaaggctgaaggctctgcgctattcgtttggcagagcctgagtattctcttgatccgtagaaaataaatctaactgaccttctggagtggaactttgaccggattcatcttcagttgatggttctctttttttgggtgttttatgagtgtataatttctcaaaaggaagtgaatacttggattttttattgtattctagtaaaagagcttctgcgaatcctaatgaaccggcacgacgttctctggcagtacgactgatttctctgacagagacacgcccaactttttctttgaaggtgtcatctttcattgtttctccataagcattatccagacgggcaatagcattaagcatattggaactaaaggacataggcgcaccttcccatgtggcaacacaaaggcgtaaaacacgatcaagagtgtgaaaaccatatttttcatagatattaattaaagtggatacagcacatatacctccggggcgagaggaagaagtaatagtgagatcatatgattcaacaaggtcacgaataataagttctctatcattaccagcttcaatattagccatgaatatttcataaggtaataacgatttgacatatttcatctgatttgcaaaaatatctgcttcttgggtgtaaacaagatcatcataaaccatacaccagacaggagtttctcttgatccagagacgagagcaacaatctctatagtgtgttgtccgttgaacacataatttatcccatcacgtctacttacttttacagggtttatctgataaaggtcaaaattagctgcagcacgctgaacgtgtttgatggaaagattacgttgataatcttgatttgaacataaatttttaataggtatttgctcaaaatgcacttggggaacaaacttttgtaaatcttcggtatttccatccataattatatttcctccaatttttttaaaatattatttgtggttgatattagacacataagctgatatttaagcttatattttgctgtatcagatgcaattttaaaatctgaaacttttaatactctttcgatagaactgttccacgagggaatcgtcaatgtaagacttgcaatttccgcatctggatcaaattgtggcaggttgcgtattgaaggaatagaaacggaagattctttccttaacatcggtttggcgtaattattccatagtaattcccttttcatatcatgataactgagatgttctatcttttcggcaagaaggtagttatttagacttaaaagttgctcttttggtaatcctgaaagctcaataatattagcttgggaaatccagagttgaccagaacgaactcgtttgacaaaatccggaactttttcatcaattatatctagtgcactactgtaagcagaatatttgtaaacggtagccattgctacattacattcttcggatattttttttgctgcgatgcttgcaccggaaatatgagatttattcgtagatgaaagttgtcttgaaactataattttttcagcatcatattttttcccaatcaggtattttttattgatattggttaaatcctctcgtttaagttggtcagtacatatccatgaaattacatcttctttactggaaaaatggagtctttttattcggaaaggaatactgtgtttacgaaataattcatatgcttctataccattaatgacaataccattccatgtgcagatgggggtgtgataggaatgacataatatctgttgttcaagttgtttataatctttttcactgagatattgatacaaattggtgaattctagttttgtttttaatgtatatatactataattgcgcatactcatctcccattatttctgatttgaattctgtttgtggcagttttgtgatgatgttatccatggaaaatagagctatttttttatctgggtaaatattgccttctaaacgaaaaatgttaaatttctcccaagaaaggttaagttgggaaagtgaatatagtaattctcggctgtacaattcataactgttaccattgatgacaaaataatccttaactttatgtgccaatttatcctccgcacaactagcctttatacctatcattttttgatcaggattaacaagaagttgaatatattctgggttaccaatttgacggagtgtattgcggtggattcgtatacgattctttttaaagtcaatacatattagtggatgggaagagtgtttgttgttcataggatttttcctcactttctgctgttgatggttcttttgctttttctatggatttatcagttgccttcttcttttcttgtatgtcaaatactgcgtagccttcaaatatattgacttgcattgatttttgatgttcttccactggaataccgaactgattcttccattcttcaggataagaaggtgtcctagcagtggttacagttccattgtcttttagagtacgaggaaatatttcaggtgaagttaaatcgaaaatgaacagtatttcattgccagaacgaattagtttgccgagaatcttgtaccgataattaggattccagtccatgagagatatcactttagcaaagaaaattcgacaggtgatttgttttggcgaacgcttttttccagaggaacaccaacgaaaagagtctttttcttcttctcgacagggacggacagccagttttttttcaatgggattgactaatatttgcacatattcgacatcgggtagtttttttatgcaggcggtatttacagataccttgtagttattaaacgtaaacgaaggttcgtaaatatgagcgaagaattcgccacgtacaacttgataaccgtcatagctgaaagaatcatcgtcaatgacttccatttgatttgaggggctgggcgcgactgttattggcataggtgtgttgattttcatcatatcagaaggttctgtagtcatattccattgatttataggttgctcgctcattgggtgtctcctttaatttctgtaataatattctttatattttgtataatggtttctttgggagtggtttgtagctcgggttctttataaggtttactttctgaagcagtctgccagtttttgtctgctgtaaattctgttaattctggcgcttgagactgagtatagtaattattaccgaagctattcatccagtcggcaggataagctaacacactcttagaatcagatattgtatcaggcatgttgttattgggggcggatacgtcgttggtacttgtcggtattcgtatttctgtatcgtccatgttgaaaataaggacattttcattgcctttttggtgggcaactcctaatattctatatttgcattttttgtcccatttaaatatctcgtataatgttggcaaaaatgcagcgccggaaattggttttggaataagttgaccatctttgagacgtgaccactgcactttattttttgtttcagaggaacatggtcggatagcaagtagttttgagcttgggtgtattagcagttcgacaaattttatgtttggaaatttccgtatagcatctttgttaaaagagatctgtttatatgaaaaagaaacagaaatccgaccaacagaggagaaaaattgtcctctggcaacttcatagtctcttaaatcgaaggaaccggcggaagcagtaattgtatcaggtacattcatatttgccggtttaaggacgctttgagatgcttcaaagtagtctctggctttaaatccagaccatcttggattaatgcttataaatccacttagagagccttcttgtatcacatgtaattctggtaaaatctctttatttccatatttcgcatttgtaattaatttttgaacagctatgaaatcatctcgggagataatagcttcgtgatgtccgacttttctgtattgattacggtcttgattgtttttccttgatttatggtcaagataattaggagtccatgtttttctcgccagaacatccccacaatggcgttcattttgaaggatttgtagtatggtactggatgaccagacatcattattcttttttgttttacaaccgagttctgtcaaagaatcagcaatttgttgagtactgcttccattcagatacatataaaaaataagctgcacaattttagcttcatgtggattgattacaagatctccattttcgtcttggtcatatccgagcagaggaggtgtaaggaatattccccgacgaaaacgcatttcaatggaagaattcataatttcacttttggtatgactttcttcctgtgcaagtgttgacatgaatgacagaatcatttcgcttttgggatcaagagtatttaaatgctctgtttcaaaaaatacaccgacgggtggacggagtgaagaaagctctcgtacatatcggatacagtcaacaacgtttcttgcaaatcgggatacactttttgttatgattaaatcaatttttccggcttcacaatcttcaatcatttttttgaatgcatctctatgttgaagcgaagtgcctgaaatgccttcgtcggcatatatttcgacaagcatccaattcggatttttatttactacatcctgataatgatttttctgtaattcatatgaggatgtttggcgtggatcatccgtagatacccttgcatatacagctactcgtagttttttttctgttttaaaaatatcctctggtggaagtgccggaattacttccagttcttctggatcaatacctttgtatctttgccggattctggctttctgttcatcaatattactgcttcgttcttcactttctttcatcaatagcgacatcctttatagttgatataactatcatagaatttttggattgaaaaagacataaaccatcagttaagtgattaacggatggtttatgtagaaatagatatttgattgttattgaatgatttaataatcattcgggttatcagcatcgtaattgtgttttgaggatagatgccaatcattgattcgtaaaatattctttatggctgaaagaacctcgaatatgtaacgtttttcagtgctggtacaatctgccattaataaatcgatatcagtttgatattccgtaggattgtataacaagtttccatagagtaattcatcaatagtaatttcaagggcattgctaattttgattaaagattctaaactgggtttacgcttggcattttctatatagcttatataaacagtagaaagatcagcgatttcagccagctcctcggcagacaatcctcgttgtttgcgggtttctcttatacgtttgcctataagtgcataatttatttccatgtcctcacctcctttccatcacaacttgactttttgtgttgtagatagaaaaaaatggtgagctatacaatagtaattggttgtataaaaagaagtatatcatatgtatatagcaaaaagaagattgtcgattgatgggagaaaaaggcgataagttataattgaacaacagtgaaaaaaaggttattatttatgtattaaaaattatgtctgagaggaaaatacatggcagataaagaggaaactaaaacactggaggaattagaggaaaaaggaagaatactgcgggggtacaaagaaaaattccggcagatgtgccaagaaaataaaatgataaagggttcgacagtgctgaaactatatgataaaattgaagaggtacaaagagaatatgagcatttagataataagctgacattaatggaatacaactttatatagttctattttttttgttttaatactactgtttcccttagtaaatacttgtaagatacatctctaatatttttgcggatttctagttacaattaaggtaactactatcggaaagaggtgtatttacttgcgtacagaggattatattgcggacaatattatagctttatgtaaaaaacgtgatatgagtaaatatcggctgtcacaattgactggtatatctcaatcttcgattggaaaaattattgctaaagaaagtttaccaaccatgcctactgtagaaaagatatgtgatgcactgggagtaacaatggcacaattctttgccggaatggatgttccagtaagcttatcagaatcacaacaagaggttctgaatatttggaataatcttgatgaaaaagaacagaatgtagtgatacaaatgctccggggacttcaaaaataaaggaaacagttgtaacgaaaatgttgactgtttctttttttatggagttgggagattatggtgattgaaaagaaatattatgatattgcacagcgtgaattggaagaaatgcaaagagaaattaatgaagaaaaagcgcaaatgtcagaagaagagatactagaggataaaaaatggcatgatgaacaattggaaacaattattaaaaaggcagaagctcatatgcgtcgttttaagaaagttccagatcctcaaaaagtagtgaagttcacttttttacaaaaagatgcattggaaattgcacgaaatatgcagatgaatataaaaactgagcgtaaagaagatgatttatgggggacgatagaaatgtcatttaataatatgtggtttttagattcagctcctagtgaatggaaagatatttggaataacttgatgaaagaagctcagagagtgtatatagaagcaaaagataacatgatcatgtatcaatattattatgatttgacggtagaagttccttgtgtgcagacacaatacaaataatgatatatgaatgctgttctgtaataattttatgatatactgtggatatgatatgtaaaaatagtcggagaaagatttgtgaatgcacgattatttaggaggaaaaaagcatgacagacgctgaaaaaagagaagcggctcaccagtttatcaatagatggatgggacgtggcaatgaggatgaagatggtcgttcttattggctggaatttttatccaatgtaatggggatggaaaatcccacagagcgtgtaaattttgagaagaaagtaatcgtaaatgggaatacaaagcggattgacgtatatatcccggaaacacatgtcatcattgaacagaaaagtctgggaaagtcacttgatcagaaaatacataactctggagatgtggatttaacaccatatgaacaggcgaaacgctataatgacaatcttccgtatgatgaaaaagcaagatggatcataacttgtaatttttcggatatttggatatatgatatgaatgccagggtaccggaacctgttaaaatagcgttggttgaattgcagagcaagtatctgctccttgattttctggtaaagcaggatgtaaaaaagttatctcatgagatggaagtttctattaaggctggcgatattgttggtctgatttatgatgctttcctgaagcaatacaagataccggacggaaatgaaaaacaggaatcagcagaacagaaagaaaaaagggaacataagttgaagagcttgaacgctctttgtgtgcgtttagtattctgtctgtacgcagaggatgctggcatatttggtgaacatcgggatatttttcatgattacttagaagcatatgatgtaaaagattgccggagagcattgattgaactgtttaagacgctggatactccaatcgctgaacgggatgaatatcttgaagaagatgttgcacaatttccatatgtaaatggtggtctgtttgcagatgaaacaatagaaatcccaccttttacagaagaaatcaaagacctgcttttgacgaaagcatctgaggattttgactggagtgatatttcaccgactatttttggagcagtttttgaatctactttaaatccggaaacaagaagatctggcgggatgcactatacatccatagagaatattcataaagtgatagatccgctgtttcttgatgatttgaaaaaagaatttaaggagattcaagcggttactgttcggagaacaaaagaaaagaggttggatgaatttcagaataaacttgcatctctcacgtttttagatccggcgtgtggttctggaaatttcctcacagaaacctatttgtcgttgcggcggctggagaatgaggtgattcgtgaaagagttggcggtcagataacattgggagaagtccataacccaatcaaagtgtctatccagcaattttatggaatagagatcaacgactttgctgttaccgttgcaaagacagctctttggattgcagaatcgcagatgttggaagaaaccaaaaatattgtctatggcttcaatgatgattttcttccgttgaagacgtatgtaaatattacggagggtaatgcacttaggatagattggaatgaagtggttccggtagaacgattgtcctatataatggggaatccaccgtttgttggatattcgtatcaatcagaaagccaaaagaaagacattgagaatgtatatgtagacgaaaatggaaaatcaacttcaacggcaggtaaaatcgactatgttgcggcatggtattttaaggctgcaaaaatgatggagggttcagaggttagaacggcatttgtttctactaattccattacacagggagagcaggtggcttatgtttgggctgaactatataaacagtttgatattcatatagattttgcacacaggacatttgtatggggaagtgaggcaaaattaaaagcggcggttcattgcgttattataggttttagcacatcaatgtcaaagggaaaatgtcgtttgtatgataatggagcgcttgaagaaacggtacaaattagtccgtacctaatagatgctccgattacttttattaacagtcgtactaatccattatgtaatgtccctaagataacaaatggaaataaaccagtggatgggggatatttgtttttgtcaccagacgaaaaagatgaactcatacaaaatgagccagaatctaaaaagttcgttcgcagggtttatggagcagaggaatttataaattctaaagagagatattgcttatggctgagagatatttctccaaaagaattaaacaagttgccgatgataaaaaagcgtgttcaacaggttcgtgaatttcgattgaaaagcacaaaagctgttactgtaaaaagtgcggattcaccaacattgtttcaacaaattagacagccagatgaaccatatataattgtaccaagggtatcatcggaaaatagaagatatataccgatgggatatgaatcgccagaaacgattataacggattctgtccagtgtattccaaacgctgatttgtatacatttggaattattacctctaacgtacacatggcatggacgcgagtagtgtgtggtagattaaagagtgactatagatattctgcaaaaatcgtatataacaattttccatggccggagccaacagaacagcagaaacagaaaatcgaagaaacagcacatggaattttggatgccagagcacttttcccagacagtagtctcgcagatttgtatgatcctttaacgatgccagtggaattaagaaaagcacatattgcaaatgataaggcagttatggcagcttatggctttggcataaaaatgacagaagaagagtgtgttgcagaattgatgaagctatatcaaaaaatgcaaggataagtaagaggagtagggaaacaggtatttctaagtgcctatttaatgcctataaagtgcctggaagtgacctttaagcgcctactccttgtcgggcttctcagtataacaacacgatagaagcatattaaaatgatttttacgttaaaaaagtgctgtgatcacaaggctttttgcaagcaaaaatgaaaaggctatatataggtagcctacgaaactggaagtgcccattttgggcctgatttaaagaatagtgtcctgacagagaacaatggaatgactctttgccggggattcaaggaaaggaaaaaatgatgaatacaaaaacagaggggaacacatttacaaagaaaatcgggcagacagtctatgttgtccgttatcatttcaatgaagatgcaaaggaaacactgcaggagaagaactgcgaaagtttgaaatgaaacagcaaaagaaaagagaaaagcataaggggcatagccccttgctggactcattcaaatcggaagttgtattattgaataaaatggagattttgatatgaaagacaaggcaaacaagggttattggcaacgacttgcaaaaatatatgcacctttgatggagtcagataagaaattttataatgcaatctgcggatatattagagattatctcaaatctgatatgaatgtattagaattagcttgtggaacagggcagctatctttcccattgtctgattgtactaatagctggacggcaaccgatttttcggaaaatatgattaagcaagcgaaaaggagaggtacaacagaaaaacttagtttttgcgtagccgatgcaacggcactttcatatgagaatgaaaattttgattgtgtagtaatttcaaatgcactgcacattatgccagagcctgaaaaagcaatgcaggaaattcgtagagtattaaaaaaagatggtattttgtacgcaccaaccttcttatgggcagagaaaaaatcaagtggtttacgaaagcgattgatgtctattacaggatttaaagcatacaaagaatggaacaaggaaaatttttgtgagtttattacggattatggctttacagtcgtcaaagtgaatttggtggatggcggtttagctcctgttggagttttgattgcgaaaaaaactaattattaaatttgaatttttctaagtgatagatactttacaaaataaacttcatatgttagattggtcagcaaaaactaactaaagaaagaggtagattatgaataaatttgatggtgttgcaaatacgttatttgttccgttagtggcaagaatcaatatctctaaaaaatttccagaatattttatggatgaaaaggctcttgagttggagaagtatttaccacaaggtgcagataaaggttcttctgaatatagcaatatggcatcggtagcacgttattacaatatggacaaaacagttactgcgtttgcaaaaagttacgcagaaagtaatattgtatatcttggtgcaggattagagactgcttatgaccgtttaagtgataagattgaaaacagaactgtacattggtatgaggctgatttgccagaagtaatagaggcaagaaaaaaagtatttggtcagcgaaaaaatgaaacgctcattgcaggcgatatgtttaaattggaatgggtaaaggaaatagacaattcgcttcctacactgctaattgtgtcaggtgtgttccaatatttccatgaagaagaaatcatagcatttattaaggggtgtggaaaagcatttccaaaaggtgagatgttgtttgacgctacaagtgagagtggattaaagtttacgaactggtttatcaaacgtacaggaaatgcaagtgctattatgtattttggtattaacgatagcaaagaatttgcaaacaaatgtagtatggaattattggaagaaaagacattctttccagaagcattgaagatgttagggaagaaactttcttttgttacaaaagtatctatgaaggttgcagagaagaagaaacaggtaataattcttcgtttgaaattgaattaactaccgtaaaattcaagtttgacagtattaaaaatagaatgtaaatttgagaacgcttaaagccactgttcatacactgtcacaggtggatatcaaacgatacggtaaataaaaaatataaataacaaaggagaccaacttatgggattatttgaaaagaaaaagaaagatgcagagcgttgcccgatttgtggcaaggagatatcctttttttcggggttagtaatcgcggacggcaccatctgtgatgactgtgagaaaatggtcagaggtcagttcaatatcgaagaatattatgggcgtgagaactggaagatatctaccagcgatccgttgaaagccatgacagtcgaagaacttaaggacatgatcaacgaaaagaaagcagagcagacgcaggtagtggaagaaattggcggtgattacgcagcgattgccaaggtggaaaagacatttggcatcgctccgaaggctacggatgtgggactgaaacgtgcaaaggctttgaaaaatagaatcgttgccacaagctatatcatgtcaggcgaattcagtagaggcgatgcggtaacggtttcatttgatggtgcagatatgactacgacgattctggatgtcatcgaatgcagttcatcaagtacatttgaaacagcgctgaatgccactttcggaaagcacaaggccaaagaaggagtcagtgcctggatcattctggatgtcatgggcggagttggcaaaggtgccctgatcaagaaataagcaatttgcgtggtttatcatttacagacacatgagtaaggaggccaacatgagaaacatgaaaaaacgattcctgcactgctgttagcactcggtttggcactgagtatgacagcttgcggaaacaaagagtcggaaactgttaccccggacaatagcaccacaccggaagctgtggagccgcaaccaacacaggaagccacgggaacagaagagacaacaagtagagatgacacgggtgtatatccgaatgcaaccggtctgacagaagtagctatgggtgtgacagaagatatctgtacatttaaagtaccgttaaactatgtacttgcaggcggctattatgatgaaaataatgaagaacatacgattcagggcttgaattctgctaccacgactgttgaggaagcactggcagccggaagcttctctactggcaatcatctggctttctttacaatgacttctctggatgcagatcagaccatgattactactggcatgtacacgccggatatcatgtcatagaaaatcgtgcagaatggctcttagctaatgcacagaatatttggaaaatatagaatattccaaatccataaaagttgaatgaaaaccaatatgagaattttacaggtggtacaaaatttgtaaaattttcatattggttttttgataatctgcaaaaattataaatttggatattaaggaaagtttcggatttttgattttttatgtatttttcaattttggatatggctccgaaattggcaattttgcggaagtgtatccacacttcctgtccttgctgtttttaaaatcacatagtgatttcacagggatatagagatatttagtctattttatattcctgtgttgtgaccggaaaaattcggggaaccaagtgtatatttatgctgaatgtgaggaactggggagcacaatcctcagcaagaatcctacgtccggaaaatatcatattgctaaaatagcgatatggtattaccggggtggatcttgctctagtgtatactgagacctcggcataaatagaaaaatgggtttggggaatccccagcaagataaaaacctgatgaaagaacatttgtcggaaagacaatattgttaaacacaggtggatcttgctttagaaaatgattagccataatgagttggaacgtgggaggaggaagtgtaaaaaaagagagagccataagtaactctctctgtgataaaatcaaaaagttatagtatcagtggttcggtaagattacaaaaatccttaacaggaatattttctttaagtggtaaagctgtctctaaaaaggtttcgtctgcaaatctttcgagttcagaatcaaaatgtataattgaagcatttgtatttaattgatatggcggaattgtaacaaaataatcataatcttcgtaagaaggagtggcgcaagaaactttgatttttccgcccaatttcaattttgcaaattctccataaatggcagttaaggctttttttctttcttcatcagaagtaattctatctacatatctaatataccaataatctatatttccctcttttaatttaattaaataatcgtatgatctgggtgttccagattttattgtccattcaattttatgcagacttgtcatcatggaaagtccacgcattaaggtagaaaaaaatttttcatgcacctgaacagtagagagatccagagaaaatccattgtctgcaattatcttttttcgttcccgtattttcttagaagaatatcccgttgcatcatataattcttggataagttctggatcatcaatggcttttgcaattttatcaatagtgcttttatatggtcttccagatcgggcaccgttgagcattcgtgaaatggttgcattatttaagcctgtttgttcagataattctttttgtgtttttttctgtaaaatgatttgaagtatattgatgaatctttcctgatcgtaaacgctgtcaggatttattagtgtgcctgaatttgatataaattcgctcattcaaatctcctcttgacttctttgactttgtataaattgacttcttgtattttatcttatcaattatatccctaaaaatcaatttaaaacataaagaaatcaaaaaatgttttattgatgttcttataaaagtcaaagaagtcaaaaacgtaattgacattttgacatctttgtgtataatgtaaatcaagaagtcaaagaagtcaaatgaatcaaaagaaaggaaggagggctgtggattgaaatatagggttgtttcggttttgaaagataatagaccacgttttttgattatttctgatattgaagaaattgaaatccttccatcaaagtatttgaagcatctggatcagattaatgcttctccgaatactgtaaaatccgcagccttcgcactttcatattattacaattatctgcaggagcaaacgataggattggatgagattacattgctatcctattcagagcagaataaacattttattgatttcttgtattgggttaagagtggaaagcatactgagcataatacacagacgagcaataagacctgcaatatgtatcttggtgcagtcttcagatactaccagtttttggcactggaagatgttttaccaatgcttaaagtcttacgagtaaaaaaagtatcgtattttgacagtatgggagtaaatcatcaaaatgcagtgaattcgtttaaaggtttcttcaaagaagaagaacctaatctggaagaaataacatccgaagaaatacaggagctgataaatgcctgtacgaatgatagagatcgattgctgatagcaatgatggcagaaaccggtcttagattaggggaaattctgggaatccattataccgaagatattgattttgaaagaaggacggttcgggtaaggtatcgtgaatccaataccaacttggcaagagcaaaaaatgcagaatatagaattgctttgttaagtaatacaacttttgagttcttggttaagtacatttctgataaccggaaaagtctgatgaactcggagtatctatttacaaaattgactggaaaaaacaaaggggagccattagatgcggattctgtgtatagcatgttgaaaaggctatccaaaaaaacggatatcaattcccatccgcatcagctccgacactattttgcggaggaaagaagaaaagaaggatgggatttgaatgacattcgttttgccctggggcataagaaagttgaaactaccattaaatacttgggtgaaaataatgaacgattgatagaagcaacagatcaatactactcaaataatgaagatttataccaaattgcagattttctgtaaaaggaaggagggattaccttggcagtattaaaaattgttccgaagttatatcaggaaaaaatatctgagaaattaaaggaagaaatatctttggttacgaatggagaagcaaaatattataaccggttatacaaattttttcagtatacagatatacagtgtactgcagatattaactatgaaacgagaaaaatgtatatggattctcttgaaaaagaggatatttcagaaaaatataaagtggaattaatgagcttatttgatcgtttaaaaatagaaaatataccggatgtctattcacatggaaatcccttctctgtagaacaggagttttttaagcaagacaaattgtttttgctgtatatccccaataagaagaaagcacaatctttccgtcaggtggtcgataagaatgatttgttatgggacttaacgaggatacattcatcacagttggtgcgacagacaaaaatattgctgtgtgaaattctgaatatggataaggcacaaagacatcgaagatattttttagaaccattaaaagcacttatacggttttgcgataagtacggaatagatgatattgaagaaatggaacaggcagacgaaaacagattttatctgtatttaaataatgagccggaaattataaaaaaacaggcttctaagattgttgagtttgcgagaagaacgttatttctaacagatccagagacaaattggcgagcgtgtatctggtatatggataggtttcagtttgataaatcgagaatcaatgccagtacacctgttaaaagcctttcatttattaatatttacgaaaaagaaaatcgttggtatttacaattatacgcaaaatatttggtcgggatatctgatctgtctttatcaaatatccgaaatacaataagttttatttcacaatttttaaaatatctggatggacagagtaaaaaagtaactgaactggagatgcaagatatagcggattatgtgtctgttttggatgagtccgatattaagtattccacttttaaccgacatatcacacatatgcatacatttctacagtttttgaaaatgaaaaatattgaagtgttgaagttttatccggaacgatttttaaaaaaaggtttttcagaacacaatgaaagaagtgttccagaaaaaacaattgctcatctgattaaggagctgccggcattcccagagcatttacagttgatgtatttgattttgttttgcacaggaattaggaaaagcgaggtttgtacaataaaatcgggagccttttattcacaaggcaatgagaattggatgcgcatatatcaaagcaaaatgcggagagaaaaagtcattcctgttcccagtttattggttggactggtgaatgattatgaaaaaaagtacggaataaaaaatggggagtatttattcaaaaataaaaagggtggtgcatttaatggacagacattttcaaatcagatgattcgggagtgtaaggttcgtgggattgcctgcggagattatatctttagagcacacgattacagacataaccttgcaacttcaatgtacggaaatggggtttctatacaaggggtacgagattatctaggacattcaagtgagaatatgacaaaacagtacattgatttcatgccggaacgtattgtatcggctgaagataaatatttctctaaaaatcagtcatttaaattgaaaggagcagaagatgatgaaaggtaatattaatttgatttcgtatgactgttatcaacaagctacagaaaaacagttggcaggactgaaatggaaggaaaacagggtgtactacatatcagagattcataatgaaaagatgcaggatgagatttatgggtatatcgatgatagatgtagacgtttgtcattatcaacagtagtaaatgatatttacagatttgatctgttgaaagaatttctgaatgagaagtgtacaagttgtagtagcatcactgataaaaaatgggaagaactggagagaagttataaagcatttttatataaaaaaggattggcgctgtatgttagaagaaatagaccggataggcggaatgttgagcaacaaagtagcgctcagatttcttttctgaaaatgtattatgagtatgttgtgaagtgtaaaacagcagatattccagaaaatgaaaaagatgtatgggatatgagaaagttggatattgtgccaaggagtaatccgattcgtggaagatatagattagattttcgtgagatcaggcagaaagaatttaaagagataataaagaaaatattgtatagccactgccagacaaaagcaatgggtagtataaaaggtgaattgcgtggattccgtcggtttgctagtttcatgtatgatcgattcccagaagtaaagcactttacagaaattagcagggatatgatagaagattatctggtttatataaaaacggatactggtcttacatcagtcagttacacgacagagctgtcggttttggataatctgttggatgaaatagggcgtgaactggaaataggaaatatatgcaacctttttctgtccagtgattgcagagcatatgacaacgctttaccagaagcgtattcagatgcagaaatcagaagatttaattgtgcattaacaaaattaaagccccagttaggcagatgtttaataatacatcagatgctcggtacaagaatagaggatacgttgactttgcgaagggattgcttatctgagaaatctggacattattttataactattatccagcagaaaacaaggaaatataaaagaccagttagcaatcagctggcagaattgattagaaaagcaatagaagtttcagaaaaggagcatccagattcagaatatatttttctgcaagataatggaaaattgtatacagattcaatgctgaaatatcatgtaaatatcatgatttatgaaaatgatatcagggatgataatggaaattattttgagtttcgtacacatcgttttagacatacttttggagtaaaacttacagaaatgaaattagatgatgatagcattgcaaggctgttggggcataaggatacacgaaccataccacattatcggcggttaagaaacgaagcattagcggaggatacaaaggctgtacgagatgaaatgaatgaattattagcacaatacaggagggaaaaggaaaatgcagaaacacgataaaatggtagcactggcaaaagaaaaaagtgcggaaatgacggaaacagcaataacagctattgaaacaatgtatagaaaaaatataaaaatttcagttgatatttcacttattttaggaaatttaataactgttatatttgattatcaaattcctcacaaacccttgaaaatactaagtttgtagcaagtgaactttcccttactctttcccttgtattatattctctcattggttttcatgaaccttaatatgggaaaaattaagggaaagaaaaattcgtacatagtataacatataacaataacgacatggtgaactgaatgaaatgttttcgatatttaactctgtaaatgattattaaaaaatggagataagatacaatgagaacaatttatttactgacagtgtttttttgatggattctccaaaataaatgatgacagcagcacttgtcagtatcatcagtagagtaataaaatcccaacagtttttcttatataattctataacctttatttctatcagtatcaccagtatccctgttcctgctacgcatattccgacaaccaatatcagcaataaccaatatatgattccggctataaacgcatttggaattttggtactaatctgtgccgcagaatgtccggcagcaatcgtccatccgataaaagtttgtatgaatgacgctgcatcatggaagaatgatttacaatcggaaaggaacacatctgactgtactgcctgaaaaagagtggttgtcagcgaataccatgcaagaaggaacaaggttgtttggaatattaccgtttttgctttatactgtcctgcaagtcgctctttttgtgtttcgtatttcgctttttcattctgataggctgtccggtcacaggcttcacatttttcatagagcaccggcttttctaccggtatctctacgattttctgatgtgtccgggcataatcccgttgttgtgttaagcatcgtattttatcttgacattcccctatcgtgacgtttgcgcttcgcagcttctctttctcgatctgcaatgctctgtctgccagcttcaagtcgttctttaatgcttgaatattcccggctctgttctctttgtttaatttctcgttcaaggtcagagattcgctgagctgcgtcttcagttccacgataagctggtctttctgttccagttcttcttgtatctcctcggtcaagagcagaagttcttccaactgttcggcgttctttgattctctggattcgttcatctatatcacgtcctttccttatttgctgttccagttcagcaattcggtgttctgtttcagtaataaactgttttcgctgttcagattctgtgccaatttctgccattgctgattttcgttttccaaaagttctatcttcgttttctgttcttccatcttggaaagcagttcctcggtatttggcaaaatgttgagcagctcggataactcgctgtttaatttttgcaatttctgattctgttcctgcataagagagagttgggtgtcccggttctgcatttccagaatcatttctgccattaaggtctgctgttcttcgatttgcccaatcatggactccattaagggtataatttcccggctttcttctaatgtcatttaatcgctccttccataatgataatgcacccgatacttttccaaaggtgtccagtatcttttgcaataacgtgttttgttgttttatgatttgattttccgctactttccacgaaccttttatttcctgcccgacaagaaacttttgttcaatctttcttgcgtcagcaccttcatggatggtaggaatctggagttttccctgtttttcataagaacggtgatcgacctgattatgcaaagaaagatgttcattacacacctttgcccactcactccgccatagttcacaattttttggattgttccatccagtagcatcggtcagcacccgtttccattgcaggcggtttcttgcaccaatcttctgaattccgttttcgtctaatacagggatacggattccatgacggtcagggtttttcttatcctgccaccagttcggatgggattcatcaatcacgatatttccgtttttatctctgacaaaatcccaatccttgacttctttctttccccaagaatgatccgggttaaaaggacgcatagtcagaagcagatggacatgggggttgccatcccctttatcgtggatactccaatcagcgcacattcctctatctacaaaagttttttggatatagtcagttgtatattgaatttgttcctgtctgttccattctttgggaagggcaaattcaaatgacctgccaaattgggcatccgcacttttttcaatcttcaatacctcattccataacctctgtttctgaaatgtgattttaaatttttctaaagcagcttctttatctgctgactttttgtatcggacagatttctgaaagcgttttatattttcctctggtactatctgccattcaggaggtgcgttttcgcacatcatcagactggtgtagaccacttcttttttagaagtgtaataactgattcgcccggtttccttatttttcatcacatccccattgagatatgcggaagcggagataacagatttccctttactacgtccgactattttgactgtgtaatgaaaaatcgccatgtctggatgcctcctttctgcacatccggcatagatttccggcaacattgctttcggttttaggaaaagcagcattgccggaacgccctctgcgtaagagtgccctgcgcatagcagcctgcatggaatgcgcccctctggcgaagagtgcctcctgcggcatgagcaggtctggctgaaagccccgccgacggaacgagcccggcaagcgtgagcgcagaccggttgccacttgtggcaaacttattgggacgacctctggttgtccataagtgcgcccttcataaaaaagcaatgaagggaatgaaaacctcatcccctccgccattacacttcctccatatcggtatttgtttctttctgcattgcctttgagaaaaatttcccgttggcttcctgctttttcagaaaaccaatcagctttgggatgtcttcttcctcaataggcgaaccaagaacggattccaccgcaccgccaacctgacagagcctatgggttcgttttttactttcttcggctttctttcgcttcagaagttctttcttctgtgctgcatatcttttcgccttttcaaggctttcctgctctttcttttccatttcaagcattcgttcttcataactttttgttgattttgccattattacattctcctttctcttgcaaacataagttcttggttgcgtatcagaagaagcacatggtataatcttcttgcgtgtaggtatatcatggcttcggtctgatagaacctttggcggtttctttggaagccgcctttttaatttgccgcagttcttgttacggcttttacatttcctctatccctcaaatcacgaccttcattcgcttccataaacatttccagaatatcggttttaatcaggactttgcgaccaacctttaatactggaagtttcttccattctacaagctgtcttaaggtgtttctgccgattcccgtatagtcagcagcttcttcgatggataatgcaatttttctttgcgtcatataatcacctccttataaattgcattatgcaattcttgtgatgtaagtatatccttttcatatctttttgtcaagcgttacgaaatattaaaagcaaatattatattgcatattgcaattttggaaaaacaatgctataattcatacataccgaaaaaggaggcagtcagcatgaaagataaagaactacgcaagctgataggcagcagagtaaaacagcgccgtctggaattgaatctgacacagccttatgttgcagaaaagatgggggttaccgcttctacaatcctgcgttatgagaatggttcgattgacaatacgaaaaaaatggtgctggaaggtctttcggaagcactccatgtatctgtggaatggctcaaaggggaaacagatgaatatgaaaccgacattacggataagagagagttacagattcgtgatgcgatgggagatattctggaacagttaccgcttgcccttaccaaagaagaagatgctttttcaaaagatttattactgctgatgttaaaacaatatggtctgtttttggattcctttcagttcgcctgcaaaaacttcaaggggaatgctggtcagacggatattgccaaaacaatagggtttgaatcgaatgatgaatataatgagattatgttcttaagggaaatcactcctaccatcaatgcttttaatgagatggcagacgttgtaaggctctattccaagaaaccaaaaacagcagaacaaaggcttgcaaatcttttatcagaagtcttatacgaagattccgaatcggtatagtaagacaaccggagttatgatatacttacacgcacgaagcatttcatcagttccgattgtctaatatcgaaaggagacatacgattatggcaaaaggatctgtaagaaaaaaaggaaagaaatggtactaccgcttctatgtagaggacgcaagcggcaatcttgttcagaaagaatgcgttggaacagaaagcaaaagtgaaactgaaaagctgctccgtcaggcaatggatgattatgagaaaaagaaatttgttgccaaagcggaaaatctcacagtcggacaacttctggatgtgtgggcagaggaggaattaaaaacaggtacgctcagcaatggtactgtggagaattacctcggaacaatccgaaatattaagaaacatccgctggcagaacggaaattaaaaaatgtaacctctgagcatttgcaatctttctttgatttgctttccttcgggggagttcatcccgatggaaaagagagaaagggttacagcaaagattacatccattctttttccgcagtcatgcagcagtctttccgctttgcagtatttccaaaacagtatattacgttcaatcccatgcagtatattaaactgcggtatcagacggacgaagttgatttgttttcggatgaggacatggacggaaatatccaaccaatttcacgagaagattatgaaagactgcttgcgtatcttcaaaaaaagaacccagccgcaatacttccaatccagatagcctattatgccgggcttcgtattggagaagcctgtggtttggcatggcaggacgtaaatctggaagaacaatgccttaccataagacgcagcatccgatatgatggctcaaagcgcaaatatatcatcggaccaaccaagcggaaaaaagtgaggattgttgattttggagatacgctggtagagattttccgcaatgcccggaaagagcagttaaaaaatcgaatgcagtacggagaactttatcacacgaactactacaaagaggtcaaagagaaaaacagagtgtactacgaatattactgcttagacagaacagaggaagtcccggcagattataaagaaatttctttcgtctgcttaagaccggatggttgtctggaacttccgactactttggggacggtatgcagaaaggtggcaaaaacattagagggatttgaaggctttcatttccaccagttacgtcacacctatacaagcaaccttttggcaaatggagctgctccaaaagatgtgcaggaattattaggacactcagatgtaagtaccacaatgaatgtctatgctcactccacaagagatgcgaaacgaaaatcggttcggcttcttgataaagtggtaggcaatgattaaaaaaaattcccttatttcccttgtgattatctcataagggcaaaaataagggaaactacatatcatttcactaatggacaggcaggaaagcctataaaatggggaaagttagaggaataattatataaattccagttgctgaacttacaaaactaacaggactttccagaggttttttctataataatccgaatgtgaaacaggtcatgatggaattgaaggaaaaacaacagggaatgatattgcgaaatcctaaaagtgatgctattgcaaaagcacaggaagcacggattaagagtttagaacagaaattatccgatagtgttccgaaaaacgaatatgaaagtcttcagaaaaaatatgaagaattacaggtgaaatatagtcaaatgaaaaagggaacactgttgaagatgtacgaccaattataggaagaaaaggagaatattttatgcagaacgaaatttatgatgagaaaaatggacttacttatatgttatgtggtgattattatttgccaaaattggcacttacagatatcgaaccaacttatgggaaatatgggatgcttcgtaaaagctatttacaggaacacagaaaggcaaaatatcaaatattgttgttacaaggaaaacttgtcgagcatttgaatcagattgatgcagaagcaagggatagggaagaacaattagtaaaacagatgatggagaaacaaggaattacagagaaattaaaaaggcaggacaacatggaatggacaaggaggatgaatgccatttgtcatgatgcagaagagatgattttgacggaaatgatatatacaaaaggataatgaactgcattggatagcaagaattttgcagcccggatagcaaaaaagtggaagtccggatagcaaaaaaaaggaagtccggatggcaagattcttgctgtccggaaagacaaaaaagtgagggattaaaaatgttggttaagtacataataaaagtgtttttatatttaattcttgcagtaatgacattgattcgctggttattaaaaattccgatgatgttgggaaatattttgctttactttttatcaattatatttattctgacaggtgttttgagttatggatttgcattggaatctgcaagagaatgtgggcgaatgataataattgggatggcatttggtgcaataccagactttgtcccatttttgggaaaaagtttagagacattggttgccaaactgttaagtatgacaaatgaatgagaaagtcaatatgaaagagggctgtgaaaggctctcttttctttttgcaactgtggaatggcaagataataacgttatatacagtgtatattaagtgcagatattgtatttctgcatgatgggaacatagggagtccatataaaggcgttgaatacgggacatgatggaagcctttcaacacttcatgcaaacagcagtcaggatatgctttccagaattgaaacgatgacattgatgggaatcgatcttcccctggaagcaatccgaaggcagatcgcttccggggtagacattctggtacatctcgggcgtatgcgggataaaagcagaaagctgttggaaatcacagaagtatgtggatttgaaaacggagagatccagaccaggccgctgtatcgctgggaagaaggaaagggacttgtaaaaaccggagaacttttgcattgtgaaaaaatgaaacgggcaggaatcagactatgaaagagcggaaaggaaagaatcagaaatggagatctacgaggaaagattacaggatgtatcattttacggggaaggagaccgcaaagtatcttctggagggagctgccgtatgcgctgcagccgactatctgttttatcagagccttcctgtgttgctgtttatgcttccaataccagtgctttttctgaaaatgcagaggaaaaaatgcactgcacggcagcagagggagctgaattaccagttccgggatgctctgacggccatgaatgtggcggtacaggccggctattccgcggagaatgcggtgcgtgccagtgtaaaggatctggggagactttatgaaaagggaagtgatatactggatgaatttcggtatatcgaaagccagctgcgtctgagtgttccggtggaagagttgttcctggatctgggaaaacgcagcggagtggaagatattgaaaatttcgcagcagtattttatacagcaaaaaaaacaggcggggatatgacgcaggtgatccagaaagtagccagaatgcttagtgataagatcgaggtaaaaaaagagatcgaggcaacgctggccgcaaagaaatcggaacagatggttatgagtatcatgccggccggtatcatctgctatctgaaactgacttcgccgggatttttggatgtactttatgggaatcctttcggaatctgtgccatgacagtttgcatggtgatctatggcttgtcttactggttgggtgtgaagattgtagacatagaagtgtaggtgaggataatgtggatacatattttgatatttatggtgatccttggggtgtttctggcaggaaaaatggggcggctgcctccggaagccggaaatccggaagaaaagaaactgtttatacggatagcgcttaccggaaatatcataggtatgctcctgacatttcaaagtggcggagataaggtttattcatccggataccgtatggaaaaagaggagacaggtgcttatgaagagaaattcaaagtatctgtagacggagaagaagccggttccctgtatgtgcaggtgccggaaaaagaaacagaaggatccgaagaagaaccggaaacagaacttagcgaagaacagcagcgcgagaaagagctgcaggacatgatcgtacaatataatcagaaaaaaaacgatccgcagtactattatcttccagatgaatggaaaggaaaacatcttgaatgggagcagccaaaagacaaaacaggaaacctgctttcagcgcttggtctggcagcagcggcagcagctgtcattgcaaaaaaacgggaagaacagaatgctcagataaaaagaagagaacagatgctgatggattacccaggactgatcatgaaatttacccttctggtgcaggcaggcttaactgccagaaaagcgttccagaaaatagcactggattacggaaagagagaagatggtaaaaaacgtgaggcttacgaagaaatccgagtagcctgttatgagatggacagtgggatttccgaagcagaggcttaccggagatttggagaacggtgcggacaggtaaagtataaaactctgtcaacactactgatccagaacctccagaaaggaagcaggtatctggccgatctgctggaaaaggaatccgtggaagcctgggaggagcgaaaaagaaaagcaagagtgctgggagatacagcagcaacaaaactgcttcttccgatggtcttgatgctcctggtggtgatggcggtgatcatgcttccggcatgcctttccttttacggagggtaggactggagaacagagaaaggaaatgtgaggtgacaaatgaaaatatgtggaagtatgtaaaagaatttgcgatggaagaggatgcggtgggtgttgtggagatcatcctgattctggtggttctgatcagtctggtcatcatctttaaggaacagcttacagcacttgttaaaaaaatccttacaaaaatcacaaaacaaagcaatacgatctgaaaataagaaaaaacggtgatatctgctgatattttcgttttggaaaggagaggtaccccttggcaggaaatgtgaaaaaaggcagcattacgatctttctggctctgatcttgagcctggttctttctcttgtgtgtgccagcattgaatctgtacgcatggcagctgccaggacacagatacttaacagtatggatattggcttatattccttatttggacagtatgaccgaacgcttttggaagattatgagctgtttgcactgtatgcaggtggaaaagaagaactggatatggcttctgtatatgatgattttcagacttatatgaaacctgtattgaaacagaacagtcagaaactggagcttctccagggcggattcaatggttatcagcttctgagcgacggaaaaggcgagattttttaccagcaggctgttcagtatatgcgtgaaactctgggaagccagggggtacagactcttctcggaaaactgaaggatcaggaaaagaagacagaggatgcagagaaaaaaggagaacaggcagaaaataaaggaacgttggattcctatgattctgctattacggacgccgcgcagaagagcgaagaagcaaaaaaagaacaggaacaacaaaaaaaccagggagatttttcggatgcaggaaatggggatgattttaccggtggtgttgatgaaagcgtggaaaatcctattccgatcatcagaagagtccgtaaaatgggacttcttgatctggtagtaccatccgaacggggaatatcggatgcggttacagacagaaaaagccttacatccggaagaaaactacagacaggactaatgttggatacggatatacgatccgataattcgtatacgtccggaatattgtttggacagtatctgctaaagaaactgggaaattatcgaagaccggcagcggcgggggtgaattatcaggtggaatatattcttggagggaagaacagtgatcgggaaaatctgaagtccgtggcaggaaaacttctggtgatccgtcagggggttaacatggcgtatctgctttcagatggtggaaaacggatacaggtcgaaacactggcgctggcgattgcatcaggttttctgatcccaccggcggcagcagtgatcgaagcggcactgatcttttgctgggcatttgcggagagtattctggatgtccgggaactttttgcaggaggacatgtacctcttataaaaaactcctcagactggcagctgtctttgagtaatctgcccaatatcctggacaaactggattcttcaagaaaggatgcagggaatggaatgtcttatgaggattatcttcaggttctgcttatggcgaaaggaaaacaggataaagttctgagaggaatggacatgatcgagtgctctgtacgtgaaaagggaaaaagaccgggttttcagatggaccactgcatcactgccctggaagcatctgcagatgtaaaagcaaacagacggaaaatatttacagttacgcgtcagtatatgtatgaatagaaagagaggtgtacagggatgctttttcagaaagaaaaagaagataaaaatcagataaacagactggatcaaaaaagagaaaggcgctctcgaagagcttttttcctgctttccccgataagccggaaaacgctttctggaaaagtatccctgtgcacctttctgaaaaaagcaagtctcaccttggagactgcgatggttttgccgctgttttttttcggagtgctcacgctgctttcttttatggatatttacaaggtacagacggagcatctgaccggcttgtgccagaaagcaaaggaagcaggtatgtatgcgtatggtgccggcggttcaggtacagaaacgatcacattgccggacgtatattcctatcagcccataggcggtctgatcccgcttcctaaaatatggtttcacaatacgataaaggtccatacatggaatggtgtggtatacgaaaatggaaaggatacagtggagagccagcctatggtgtatgtgacagaatcaggaagtgtgtatcacagaaaactggggtgcagttatctgaatctgtcttttcagcagatatcaggctcttcggttaaagctttaaaaaatgcatatggagaaaagtatcaggcctgtgagctgtgcagtcgtgggcaggaaccggccggagtggtatatatcacaaaaaagagtaaccgttttcataacagggaaagctgcagcgcattgaaacgatctgtacggatggtgaaagaaacagaagtttccggtgaaatgagtgcctgcggacgatgtggctgaagggagagatcatgagcagtgtaaaaatttgcatgactgtacttcttgtaattaatacctggacagatatccgaaaaaaagaaatctgtttaccggtgctttttatatttctggcaggcgggatcctgtggcggatcaggcaggggcttctctggccggcagggattatttccatgggaatcggagtatttataattttgatcgctttgatcagtggaggaatggtcggatttggagacggattgctgatactgacaatgggctctgtgctgggagccggagaactggcagggatcctctgtggtgcattattgttgtgcggaatctactcaggtattgagtatcttatgctaaaaaagagtcgaagtgaggaaattccttttgtaccgtttctgctgatcggatattttggagggatatttttgtgagaaaaataaaaaagggaagctttacaatagaagctgcattgctcatgcctctggtgcttatgatactgatcggagtgctgtatctggatttttttatacatgacagagcatatctcactgcggcagcttatgaggcagcagtcagcggcagtatggaaggatataaaaagaaagggaacatatatgaaaaggcggatatacagggaagaatgctgggagatatcgggctgccgggaggagagaatctgagcatgcagacaaatgcaggaaaaactgtgaaagtaacttacagactggaagtacctgccgggttcctggggcagaaatggaagctggaagtcagtggtaaggcaaagcctctgcggcctgtgggatggatccgcaaggtaaaaggaactgtggatatgctgggagaggtgacgccataaaatgagaacggaatataaaagagatatgaatcataattatctgatcctgacaggagatgagagaatcgatacagattcttaccaggtaaggatgatcgtggccaatgctgtgccggatcttcttcagtgtcggatacagggaatcgacggaaaattcatggtgtattatgatataacttccaggcattccatgactgcgctttttgaggaaaaaaagatggatctggagtcgcttcaggtgatactgggaggctttatacagatcatggaagaaatgtccgagtatcttttgaatccctgtcagctgatcctggaaccggaatatatctatctggatgcggaaagaaaaagtgtccgattttgttatcttccgggatttcatggggaaatacagaaacagtttcagagtcttgcggagtatatccttccaaagctggatcatgaagacggaaaagcggtcatgttgggatataatgtatacagacgtgcactggaggacagctttcatctggaatacatcaaggaagagttatataaaatatgtaacggcgacgaggaagatttttcttcatatgaaaaaaagaaaacagtggtccaggaagaaaacaggatgacagaggaggaaaaagcagaggatctgtggcaggtggaaggctgggaaagagccagtgtgtccggaaatgaaaaacagaaaaaatcttcagcggactcacagaagcggaaaacaaacaaaatatggaagccagtggctggatttggtgcagcattggtgcttcttctgggaattacggcaggaatggccggcggatatattccaagaataagaaaagaaatttttcttctgggaattcttgcagcaatgatactggggatgctgagttatattctgatcaaaaaagtctgtggaaaaaagaaaaaactggatacgccggtgcctgagcagaaatatggtgcggcggaaaaagaggcagctgtatattctgaagatcagaaagaatctggtacgctgtcagggagcaatgctggtgacagcagaaaagaactggaaaagatcaaaaaaaatatcccaacaaaagcggaagattttttagatggatttggtgaaacagtagttctttcggcaggtgcatccaaaggtcctgctacattagtaagccgggaaccgggggaattggctaccatttatctggaaagagatatcacagtgatcggaaaactggaaactgcggcggatgcagtgatcaatataccaactgtcagcaggatccatgccaagatccgaaaaagggagggggcatattatctggcagatctgaactccagaaatgggacttctgtaaatggacagcttctgaaaacaggagaagattatttgctggaggatgaggatgaagtcgattttgcacaggcccgttatatttttttgaaataacagagcgaaaaatccagttttgtatcgtattaacatgggacagtaggttgtccgcctgatgaaaatctgttaaaataatgaaataaattcgaattttcagattataacagcgagttatgggaaatatttccggaaccgctgtggaaagaggccggaattggaagaaataaaaaaagaacctgtgacagttttactgatcctcataaatacgctgatctttcttgtggtggaatttaccggcggttcggagaacgggcagcatatgctagaatgcggtgctgcttatgcaccgctgatcctggaacagggacagtggtatcggctgtttagcagtatgtttctgcattttggtgcgccacatctgatcaataatatgctggttctgtttgtgcttggccagaggctggaaccggtaacaggaaagataaaattttttctgatctatatatttggtggtctgggcggaaatatgctctctttgttttttgatatgtatgcaggaaacgcttctttatctgcaggagcttccggagctgtttttgcagtcatgggcggtatgatctatgtgatcatacggcacagaggaagagtggcggatctgactgtcagacagatgctgatcatggccgcattttcactgtatttcggatttgcaagtgaaggcgtggataacgtagcgcatataggcggtttgttgagtggtttcctgatcgctgtaattctttatcatcccagaaaaatatggaaaacagttccctgaccgggagcgctctcaagcgtgatgtctccactgtgtgcctgagcgatctgttttgaaacagcaaggccaaggccggtcccggattctttggttgtaaaaaatggctgaaatatcgtagcctgctgttcctttgagattccacatccgttatcccggatatcaatgcggatgccggaattttccggaatgacagaaaaagaaatctttcctccgggaatgggaacggcttcccatgcgtttttcagaagattcagaagcatctgacggacacggatccggtcaagagccatcgatggcaatgaatccggaatatctgtttcaagtgtgatctccagataatccagagtaggttttatggaggaaaggatcgttcggaggtagctgcaggtgtcaatgttttctcttttgacatggcctgcattattaaatgcagaaagttcatcaagaagttcttttacataatcaagattatccataacatcatcccagtgctcatattctttgacatcaggatgtgcagatgcgatcatctggagtccgctgttaataagagtcagaggattccggagttcatgtgaaaattttgaaagtgtataatgaaaatcgtttttcaatttactgactgtagtatcgttgcacatattatcacctcgaaaaaatattaacatcagaaatttcaaatatcaacaagaacagtattgaaaaattcgagaaaatacgacaaaataagaatatagataaaataattttgcaaacaaggaggacaaaataatgggagattgcatattttgtaaaatcgcaaatggagagattccatcagcaacactttatgaggatgaggaatttcgcgtgattctggatctgggaccggcaagcaaaggacactcattgatcctgccgaaaaagcatgcagcgaatatttatgaacttccggatgagactgccggaaaagcaatgatcctggctaaaaaaatggcaggaaagctgagagatgcactgaactgtgatggatttaatgttgtgcagaacaatggagagattgcaggacagactgtgtttcattttcacatgcatctgattccgagatatgagggagatggtgttggtttaacctggaaacccggagaactcagcgatgaggtgagagatgaaatcttaaagaaaattaaagaatgacaaatagccactaaagaggaaaaatgaataatcagacatttgaagagttttatcttaaataccgaaaaatatccagagggtatgcgtatggggttctccatgactggagtactgctgatgatgtcagtcaggatgtactttacaaaatgtatactataaaggatggcctgaatattgataatgaaaagatgatgttttctctgatcaagagggcatctatgaataaggctttggattatataaagaaatcaagctccaagcatgagtttgtctgtcaggaagaagttgcggcatttctggaagaacagaattcggtcgatgcggaagaggtatttctgcgtaaagagaagaaagaatttatgtatatggtgctgagaagatttcgaaaggaacagccgataaattatgagatattaattcaggtcaaatatctggagatttccgttgaaacagttgcagaagaatatggtctgacgaaaagtggtgtcaataacaggatatataaagcgaagcgctggctgcaggaagaatttcgcaaagtatacgaataaaagaaaaccctgccagcccggaagggagtggcagagttttcatatggctgttgtggaaatatagtcaggctctggcgcattcttcaataagatcagtgatcttactgatggaatctacctggccgtttcctgccatagcatctgtatatttctgacgatcggtatagagctggcggatggtttccagaagcttttcttctgtaatctcctcttcttccagcactttactgaagccctggcgttcgaaggatcgagcgttaaggatctggtcaccacgactggctttggcagaaagcgggatcagaagatttggcttatgaagttcgcggatctcacagatcgcgttagcgcctgcgcgggagatcacgatatcagccatggcaaacagatccggaagctcgtcctggatatattcatactggacgtatccggcagtaccgttgagagattcatcggtttttccctttccgcagagatgaacaatctggaattccttcagaagttcagggaggatcttgcggacattatcattgacagaagcagctcccagactaccaccgataaccataagtaccggtttgtcagcagtgaaaccacagaatttacgaccgttttccgcatttccggaaagaagttcctggcggatcggagttcctgtaagaactgctttgtcagctggaagattggcgactgtctcaggaaaattacagcagattctggatgcagaagagagacagagtttattggcaagacctggagtcatgtcggactcgtggatcaatgcggggatttttaaacgtttggccgcgatcacaacgggaaccgtaacgaaaccgcctttagaaaaaacaacgtccggtttcagctctttcagaatctttctggcctggctgaatcccttcagtacacgaaacgggtcagagaagtttttgagatcgaagtaacgtctcagctttccggatgagattccataatatgggattccaagttcttcgatcagttttttttcgattccttcgtaggaaccgatgtaggaaatcttataaccaagctccctgagctttggaatcagggcaatatttggagttacatgtccggcagtaccaccgccggtaagtacgatgtgtttcatttggattcctcctgaatagtcatatactatcattaaatatgaactctaacggaggaattgtcaaggaaagataggattacaggagaaaaataatggaaaatttcagggatgccgaactgaaaaaatggttggcagaagaatatgaaaaagaaaccgaagagatggaaaaaatcctgtttccagatggagtgattcctgatgatggagaaacagaagaggaggcaaaggctgcttatcagaggcttgtagaaaaactgaaagcagatggtgtttacaaagaagacgaaactgacagtattaaaactgatgatcataaagagaatgtaaaaatcgtttatctgcccgaaaagaaaagtcataaagcagctcgcgtagcggcagcagtacttgtatgctcagccggtatcttcgccgcaagcatgaccagccaggcgaacaggaggtatttccttgattctgtgaggtattgggtaggggatgatacgaaaattgtaatagataacgataaaaagagtgagaaagaatatgaagatgaacaaaaggcaatcgatgatatagaagagaaattggatattgatttgccatatttaatgtatcgtcctcaaggttttaaatttaaagactacaatgtcagtaaagactttgaatatgctttattgcagtatgattatgaggatacaattttaacagtatatgttaataaatatgataaagaaactaaaagtagtggtgcaagtttagatggaaaagaaatagaaactattaaattaccggaggaggaaattcgtattgaggtaaaaaaaataatggcaaaaggagataagaaagtcagttatgttgcgtattggaataattctacggaattttatcaaatagaagctcaaatggaagaaaaggagtttataaaattgattcaaaatataaaattttagcgagataatgtcttttctacatcgtatatatagtgtaatgaaagtttaaaggaggaaagacattatatgaaagagaaaatgaaaagaatagtaagcctgttgtttttagcatgctgctgtagtatattatttgcagttccagcgatggcagaaagtttgtcagatgatttttcagtggaaacggatacaaacgaagattatgcagaggatacggcgtacagtgttcttagaggcaataatttaagttttggaacaacaacgataaaaaagatggcaagtaataaagttgggatttctggaataactcagtgccatcatgtatgcaataccgtttatttggaaatttatttggaaagaaaagtaaatgggacatattctacatataaaagttggaaatttaccgcatcaaatgcaagtaacttagttaaagatattacagttattgtgccaaagggttattactaccgtgtacgaggttatcacgcagctaaagatggaagcaaagagtctacaaggactttaactagcggtgttttagtaaaataacaaatcaacaaatcaactctcacacccccccagcgatgccactcccccaaaaaaataaaaaatccagtaaactttacattaccttcgctggggaatgtctaaaaattctgaataatatcaaaaaatctaaaaaaatccccttaaaaaaagaaacatatttcacaaaaagactgtcaaaaaacatatatttcgtgtataataaatacaataacaaaccgttaataaacaaaaagtcgattatttcttcttggaattgtatatcacagcgtttctggacgatcggatatcacagagagatccttcaggctttttttgatatggaaatttcagaacgtgggacggaaaagggggcttgtgcatgaagataacatttatcggtgctacgcatgaggtgactggaagctgttattatctggaagcggcaggacggaagtttctggtggattatggaatggagcagggaccggattattatgagaataaggagcttccggtggctccgggtgatctggattttgtgcttctgacacatgcacacatggatcattccggaaatcttccggccttgtatgcaaaaggctatcaggggccgatctatgcgacagaggcaacttgtaatctctgcgatatcatgcttcgtgacagcgcacatatccagatgttcgaggctgagtggagaaaccgaaaggggcggagagaaggaaaaccggaatttattcctgcgtacactatggaagatgccatgggtgtgctccggaacttcgtcagatgcccatatgataagatcatcaaaccggcagagggaatcgaagtaagatttgtggatgcaggacatcttcttggctccagcagtattgaagtctggatgacggaagaggacaaaacagaaaagatcgttttttccggcgatatcggaaatatcaatcagccgctgatcagggatccggtatatatccgagaggcagattatgttgtgatggaatctacctacggagaccgcagtcatggagaacgtccggattatccggcaatactggcagagatcatccagaggacctttgacagaggcggcagtttggtgatcccgtcctttgcagtaggccgtactcaggaaatgctgtattttatccgacagatcaaagaacagggactggttcacggccatgatggttttacggtatatgtagacagtccccttgccaatgaggcaactacgatcttcagtgagaatgcatatacctgctatgatgaggaagcaatggatcttttgaataaaggtatcaatccgttatccttccagggattgaagacctccgttactaccgatgattccagagctatcaattttgatgagaactgcaaggtgatcatttccgccagcggcatgtgtgatgctggtcgtatcaaacatcatctgaaacacaatctgtggaatcccagaaataccattctttttgttggataccaggctatcggaactccgggacgggcattgttggaaggtgctgtggagatgaagctgtttggtgagactgtgcaggtagctgctgaaatatgcaaaatgccgggaatcagcggtcatgctgatgtaaacggacttatagaatgggcgaaagcctttgagacgagaccaaaacacgtatttgttacgcatggtgatgatacggtgacggagatttttgcccagaggcttaaagaagagcttgggtatgatgcaacagcaccctttagtggaactgaatatgatcttctggagaaccggtgtatccatgaggctgtcggtgttcggatcgtaaaggcaactgcttcgccgaaaacaaccaaggctgcccgtgcatatgagaagctgctggctatgggacgtcgcctgatgtccgtgatccggaagaatgaaggctgccccaataaagatctggatcgttttgcaagagatatccagtcactgtgtgacaagtgggatagaacggacatttaaccggataacaaagataacattgaaacaattattttgtcagattatcctaaaatcaccctgcggaaatttttcgcagggtgatgataaatacgatatacaaaataagattatgtgagatcagccttcgttcaatgcctggcggatggcttttgcaagctgatccggacatgaagttggtttgaatccgcagcggatgccttccagacgggagatcacttcatctgcatccattccctctgcaagctgtgcaacaccctgtgtgtttccggaacatccgcctgtaaacttgatattgtgaacttttttattattgtcgatctcgaactcaattccctgagcacagacgccttttgtcttataaaccattctggttacctcctgttctgtttatttatcgattatagcatctctcaaaaaaagtttccataaaaaataaaatttgttataatgaacaatgtagaaaaagaaaaagatactgctgaacggaaaaaactgtgaaattcagcgggatatcatattgaaagagaggatttacagatcatgaaatgtgttggaatcataggagcaatggaacaggaagtagcaagactgaaagaggttatggagaatgtatccattactaccagagccggaatggatttttatgagggtgttctggaaggaaagaaggtagttgtggtacagtccgggattggtaaggtaaatgccggcatgtgcacccagatcctggcagatctctttcaggtggaagcggtgatcaataccggtatcgcaggaagccttaacaatgatatcaatattggagatatcgtactttccacagatgttcttcatcatgatatggatgcaaccggattcggatatccgaagggacagatcccgcagatgaaagagttttccttccaggcagatgagtgccttcgtaagatcgcacatgatgtatgcgaggaagtaaatccggagatcagggtttttgaaggaagaattgcttccggagatcagtttgtatgtgatcagggtgtaaaagataatattgtaaaggaattcagcgcctatgctgttgagatggagggcgcagcgatcggacaggcagcagctcttaacgggattccattcctgatcatccgtgctatctcagataaagcagataatagtgcaaacatggattatccggcttttgaaaagcttgcaattgagcacagcgtacgtctgacccagggaatgctgaaacggatggcctgatcggaactttggagggaaccgtcatttttcttctgcatatactgtaagagatagcagagagaggacagcagaagagttatgatctatccagatttttatccgttttatgctacacagggaagtcctggtttttataatgaagagagagaacaggaaaaggaatttgatctgatgagatcatactatccggatacagcccgaaggatccaggaaaaagcggaagcacagtgtcagcttttggattatgagggaagccggctgtatgatgaatatccggatcgtttcatgctctatcacatctgtcaccaggtgaaaggacagatggaaggagataccagtgtacaggagattccaggagggttcctggatgatctgatcgaagtgctggtgtatcaggagatttccagacgaagatgcaggaggaaaaggtgcagaaaatgtttccgcactgagtattaaaatggcggtttacccatgaacgatacagtgatactggcagaagcgaccaaaactggttcgcacaacatctgtccatatacaataaaacaaaaagtgaatataatggaagtatgatgaaaacaataagggaatttttagaagaacagattaatgaacagctgatacaggctgttgtcagtggccgcaggactggcgagggaccttccaaggtgaagcttcgtcctgtggagctgaagggtcagattttttaccaggcgtccatgacagaagggacgaaggtttatcataagaattttaccagggaagagatgatcgcttatctggagcatgccatggaggaatttcgtcagcttcaggcaaccggacgcagtcaggatggaagtatccttatcagcaagaaagggaaagcaaccatcaaaacaaaacaacacgggcctgcacagaatgagaagataaagatcgctcctcataaccgggtgaaacagtacattctcagagagggaacggcagctccgtttctggtggatctgggagttatgacaaaggatggaaagatcgttgcttccagatatgacaagttcagacagatcaatcgctttctggagtttatcagggatatccttccgaagcttcctaaagacagagagatcacgatcctggattttggctgcggaaaatcctatcttacttttgctatgtattattatctcagagaactggagggttttgatgtaaacatcatagggctggatcttaaggaagatgtgatacggcattgcagtgaattggccagatcttatggttatgacaagctgcatttttaccagggagatattgcagggtacgaaggcgtttcttctgtggacatggtggtgacacttcatgcctgcgatacagcaacagatttcgctctggccaaggcagtggaatggggggctcaggtgatcctgtctgttccatgctgtcagcatgaactgaatcgtcagatccgaaacgaaatgctccagcctgttatgcgttatgggatcctgaaggaaagaatggcagctctgatcacagatggtcttcgtgctgagcttctggaaagcaaaggatatgaaacccagcttcttgaatttatcgatatggaacatacaccaaagaatattctgatccgcgcagtaaaaaccggaaagaaaaagagcagggacagtttttcggataccatgaaggctcttcatgtggctcctaccctggataggcttctttatccggaagagtcagcctcacagaagggagaatgacatgatgaagatcctacgtaagggagcgatactgctggtgatctttgtggcagtagtagccgggacctcatttctgatgaacagtcagtctacagataaccgctcagatatgaacgatgccacacttccagaggttatggtaaagatcggaagtacccaggcaaataagatgtatggatacagacagcagatgcagaccgatttcatgagaggaagtattactccgctggatacgaccaaaaaagtgtcttttgagatcaacccatatgctgatacagtaacagggcttgcttatgaggtacggacttcagacggaagcaaggttatggagaaccgtaagatcaagaatctcacgaaagaggacaacggctgtttaagtacagagattgagatcggcagtgaccttcgcatgaaccaggagtattccatgcagatcacgctggataccagtgagggggaagtctactactatacaagagtggtttccagaacccagttgaatacagaagcgtatcttcagtttgtcaaggatttttccacaaagtgtctggacaaggaacaggcagatacgctgaccggatatctggaagcggaggatatttccggcggaacgaattacaataatatttccatcagttctggactttccaatatcagctggggatccctttctccgaagctctacatggaaggagttccgctgatcgatgatatcaatgaaacgactgcaagtatcacgctggattatcaggtttccgcacaggatgatgagggtaaaaccgaaatttatgatgttacggaattttaccgtatgcgttatacagaaacaaggatcatgctgctggattttaaacgttctgcaacgaaggtatttgatccgtctcagaaggtagtttccgatgcaggcctgcttctgggtgtccgtgacaagaatgtcacctatgcttcagacagcagtggaaagatcgttgcttttgagcaggatggggatctctggtcttatgcaccgtccagcggaaagatcacaaggatcttcagcttccgcaaagaggaagataacgattccagatatgtgcgcaacgaacatgatatcaagatcatccgagtggcagataacggggatgtggactttgtattgtacggttacatgaaccgtggtgttcacgagggatacagcggtgtctgtgtttatcactacaacagcgaccgtaatgtggtggaagaaaaagtattcataccaagtacagaatcctacgagttcctgaaggaagatcttggaacactcacttatgtaaacaaaaacaatcagctgtttctgctgtttgcacagaagctgtatcaggtagatattgagacaggaacctcacaggttctggaagaaggaatcaaacagaaccattttgttgtgtcagataccaaggcacatgcagcatggctgatcgaatccggagatgatgcagggaagatccgggaaattgaatttgattctctgaaaacaagagatatttcgccggaaagcggaaaaaatctgagagctctgggatttatgaatgaagatctggtatatgggatcctttccgatgaagatattcttacggatgccaacggacatgaaacagagggaatcagtacattacgcattgaaagctttaaaggaaaggtgaaaaaagagtatcgtcaggatggcctttatatcaccaacgtaacggttggcagtaccatgatggagtttgaactttctgcaaaatcggggaatgcttatacagtccagaaaaaggacaatatcatgaataacaaaaaagcatccggaagccagatagatgtagcattgatcactacaaaccgtgcaggaacgctgatccgcctgaccatgactcagaaaccggagacagacagtccgctgcttgtttgttccaagatcgagagtactgaagactcatcggtaacattggatactaccgttccacagggagaactttattatgtttatgcatatggttctcttgaccgtatctataccgatccggctgcagctgtgaaacgcgcggatgcgcagactggagtggtacttaaccgtgcgcagcagtatgtctgggaacgtggaaacaaaaaaacaaagctccagatgaatatagaggatgtaccggaaagtatacgtacagccaactggaagaaaaaagaacttcaggatagccttggtgatatgggaacggtgatcgatctgaccggctgcactcttgacaatgttctttatgaggtcagtgcccagagaccggtgatcgccaagacaggagaaaattccagtgtggtgatcgtaggctatgatgaatataatacctatctttatgatccggcaacagggcagatcagcccgtatggaatgaatgacagtacagcgctgtttgagagtgccggaaatgtatttctcacctatatagaaaacgtcatagagtgatgcttacagagcaggccggatgaaggccatggggttacagcaggatggcaagacgggagttcccgtttggcataaatcggaaaacaggaaaaaagttcctgttttccgggaaaagcgcgacaggaaaggggaaaaatcaatgttaagtgaaagtattaaaaaactggtacagtatggggtggagagtggtattactccagaatgcgaaagaatttatgcaaccaatcttcttctggatgtctttggggaaagcgaatatacagaaccggagatagagtatgctaaaatcaatcttgaggagactctgaacgaacttcttgatgaggctgtaaagaggggcatcatcgaggacagtattgtgtacagagatctctttgatacaaaactgatgaactgtctgatgccgcgtcctgcccaggtgcagagagaattctgggatgcttataaagaagatccggaaaaagctacagattatttttataagctgagtcaggacagtaactatatcagacgttatcgcgtaaaaaaagatcagaaatggacagtagacagcgaatatggcaagatcgatatcacgatcaacctgtccaagccggaaaaagacccaaaggctatcgcagctgccaagctggtaaaatccagcagctatccaaaatgtctgctttgtccggaaaatgaaggctatgcaggaagagtcaatcatccggcaagggagaaccacaggatcatcccgatcaccatcaatgacagtccatggggcttccagtactctccatatgtttactacaatgaacattgtatcgtatttaacagtcagcatactccgatgaagatcgagagaaatacatttatcaagctgtttgattttgtaaagctgttcccacattatttccttggctccaatgcggatcttccaatcgtaggaggttctatcctcagccacgatcatttccagggcgggcattatacctttgccatggcgaaggcagagattgaaaagcatgtgacgatcccgggatatgaagatgtggaagccggcattgtaaaatggcctctttccgtactgcgtatccgcagcaaagacgagacgagactgatcgatctggcaacacatgtactggcaggctggagaggatatacggatgaggctgcatttatctttgcagaaacagacggagagccgcataacaccatcacaccgatcgcacgtaaagtgggagatacctttgaactggatctgacattacgtaacaatatcacaacagaggagcatccgctgggggtttatcatccgcatgcatgctatcatcatatcaagaaagagaatatcggtcttatcgaagttatgggactcgctgttcttccggcacgtctgaaagaagagctggagcttcttgaagaatacattttaagcggcagggacatcgcttccaatgagaaaatcgagaaacatgctgcatgggttgcagaatttctgccaaaatatgagaaacttgataaagataatatccaggaagtccttcgcagggaagtgggcaatgtatttgttcatgtactggaggatgccggtgtttataaatgcacaccagagggcagggatgcatttatgagatttatcaatactctgtaaaaaaaagtacggaggcacccggggatggatatgtatttcaggaggagtttgtttatatgaaaaacagagaaaaaaccggaaaggcctttcggataaaatggcttttgctggcacttgtggcagctgcactgatctttgtgccggctgcatcgcataaggtgtcggcggcgaagcttgtttataccgttaagttcaataataattcagggaccagcaaaagtaagacgtataccgcactgacacggaacgtgacattaaatactacgatccggcttccggcagtacccaaggctgtgggatatcagaatctcggatggaccacacggaaggggagcagtaaggtagtatataaagcaggtgccagcgtaaaggtcagaaaagatatgactctgtatgcggtccgcagaaagagcagatactataccgtaaacttctatcttggaaatggaagcaccaattccgcatataagaagctgcagaaaaaagtagaagagggtacatattacacattgcctgcagttccatccagatcgggatatgtaaatcttggctggtcaacagcaaagaacggcaaggcatctactgcaaaaaaagtaggaacgaagattaaaatctccggtaatatcagatactattccgtacagatgcagtcagtaaaagtaaatctccgcaaggcaaacggaaccgtatggaagacagtaacacttggaaagggcggttaccttaagctcccatctgtatccaatgcgacaggttatacgtttatgggttggtctaagaccagacggaccggttcttccacagatccggattatgaagccggcgaacttctgcggatcaacaaaaacaccaatctgtatgcgacagtatttaaccgtgcactggagaaggatatcagctccgatgagatggctcatccggcgatcggtatgatgtacagtaaggttatttttgtgggagattcccgtactgcaggaatacaggcgacactgaacaaacagatgagcagttctgtaacaaatggggtttcttttgttgcaaacccaggaaagggcttgagctggttccgggatacaggatatgcacagcttatagaagagatcgacaaaacagaaggttccaaaccgatcgccgttatctttaatctgggtgtcaatgacctgggaaatgcaggcaattatgtcagctatatgaccagtatcgcatccacattgaaaagtaagaactgtaagctcttttacatgtctgtaaacccgatcaacagtaccatgatcacaaaagcaggaagaggcgcccgtacagaggcacaggtaagagaattcaacagcaagatccgttccggtctttctctggattacaagtacatcgatatgtacagcgtacttatgaaaaaaggctacgggaccaatgcttcctacaatggcacagacgctgacagtgatgatggacttcactacacaacaaagacattcaagaggatctactattactgcattacttatctcaacacaggaagtatcaacgcatcttattattaatggtataacagacagaaaaatcccgtctgccggagacattccgccaggcgggatttttctgtccggcggcccgctatttttctgtccgacagggcaattactccttgcacgaaccatgagaatagtctatacttaattcgatacggacgtttggaggtccgcagggacgtgtaatcctgaatatgaggaatgaggtatagattatgaaactgacaacagtgaaagagatttacagaaaccgtgaacagtatctcgacaaagagatcaccgtaggtggatgggtacgaagtgttcgtgattccaaggcgtttggattcatcgtacttcatgatggaagcttttttgaaactcttcagatcgtatatcacgataacatggagaatttcgcagaggtttccaagctgaacgttggagcggccatcattgttaagggaacgctggtagctacccctcaggcgaagcagccatttgagatccaggcaacagagatatctgtagagggagcttccgcaccggattatccacttcagaagaagagacacagtcttgaatacttaaggaccatgacacatttaagaccgagaacaaatacttttcaggctgtatttcgtgtacgttctctctgtgcatatgcgatccataaatttttccaggagagaggctttgtctatgtgcatacaccgctgatcacaggaagtgactgtgaaggtgcaggagagatgttccaggtaacaacactggatccgaagaatattccgctgacagaggatggaagtgttgattattcacaggatttcttcggaaaggagacaaaccttaccgtaagcggacagctgaacggagagacttatgcacaggcattccgcaatatctacacattcggaccgaccttccgtgctgagaattccaacactacccgtcatgcagctgagttctggatgatcgagcctgagtgtgcgtttgcagaccttcaggacgctatggagcttgcagaggctatgctgaaatacgtgatccgttatgtctttgagaatgcaccggaggaaatgaacttcttcaattccttcattgacaaggggcttcttgacagactgaaccatgtgcttaattctgaatttgcgcatgtgacctatacagaggctgttgagatccttgagaagaacaatgacaaatttgattacaaggtattctggggatgtgatcttcagacagagcatgagcgctatctgacagagcaggtctacaagagaccggtatttgttacagattatccgaaggagatcaaggcattctacatgaaactcaacgaggatggaaagacagttgcggctatggactgtctggtgccgggaatcggagagatcatcggaggaagccagagagaggatgactacgacaagctgaaaacacgtatggatgagctgggtctgaaaccggaggattacgatttctatctggatcttcgtaaatatggttccacacgtcattccggctttggtcttggatttgagagatgtgtcatgtaccttacaggtatgggcaacatccgtgacgtgatcccattcccgagaactgtaaagaactgcgatctttgatcagaacacttttgcacagcaggacgttctgtgctcctgagatcagagaacagcagagagaaattggcaacaggtattgatatgtgtgactgacacacaagggagaacattatgagatttattcatcttgcagacgtgcatctgggcgcggttcccgacaggggctgcccgtggagcaaagagcgggaggaagaaatctggagcactttccgccgggttattgcgggcatccgcgaagatccggtggatttgctatttatatccggagatctgttccaccgccagcctcttatgagagagcttaaggaagtaaattatctgttttccaccatcccagataccagagtgtatctgatggcaggaaatcatgattttataagcagagattctttttataatacgtttgagtggaattccaatgttatatttttcagaagcagggaactgacctgtgttaaagatcccaggcttgatgtctatgtatatggactgagttactatgaccgggaaataaaagacggactttatgatcaggctgtccctgtccagaaagaaggaatccatattctgctggcccatggcggcgatgagaagcatattcctctcagtgcagcagctctggcggcgtcaggcttcgattatgtggcgttagggcatatccacaagccgcagatcctgatccgtgaccaggcggccttttccggggctctggagcccattgacaggaatgatacaggggaacatggatatatggagggacgactgatcaacggaaggatccgtacagagttcgttccctttgcctgtcgttcctatcagcagctggtaatgacacttcacgaggaaactacacagatatctctggaagaagcggtaaaatcccagattttccgcagaggaggaaggaatatctacaggatcattcttcagggaatgcgttcgccggatcttcttctgatccctgagaaactgaaaagtctcggaaatgttaccgatgttgtggatgaatcctggccggcgtatgatcttggtgagctctacaaacgctacagcggtactctgatcggtgattatatcggctattttctggccaaaaagggtatggataccgtggaaaaaaaggcgctgtattatgggcttcaggcattgcttgagacaggcagccggcgataaaggggcagcacaggaggatagcataagatggttatcagacgtttaaaaataaaaaatttcgggaagatccgggacaaggatatggagctttcgcctgggatcaacgtactttacggtgaaaatgagagtggaaaaactaccacacatacatttatccgctccatgttttacggcgttcgcagactgcggggaaaggctgctctgaacgatacatatacaaaatatgaaccgtgggaaaatccggcagaatatggtgggatcatgtggttcacaagcaaggggaagaagtatcgtctaaccaggaatttttataaagaaaagaagctgggagagcttctctgtgaagatgatggcagccttgtggatgccgaacagggagctcttgggactattctgggaaatgtaagtgaggcagtttatgataatacggtgtctgtggcacagctgaaaagcgttacaggaaaagatctcgtacgtgaactgcagaattacatggccagctatcagggaaccggtgacagttccattgacatgggacgagccatgcagatgctgaaaatgtccagaaaaggatatctgacagaagcggcccggcgaaaaaaggagctggaaaaggaaaaagaaaagatttccgcaaacatggaatatatccgcagagagatccgtgaactggatgagaagcgtgatcggatcatgcagcagcaggacgggatgaacatagggaccagagaacggagtacagaggatcttcttgagcttcggatcgatcgtgtaaaaagaaggcgggagctgacagatgcagttctggcagttgtgctgcttggtgggattgccggtaccggctgcctggcagctttttccgggcaggtcattttcagtgttctggcaggcgtggcaactgcggcgatttctgtagcggcattgttttttcgcatacggctcagcagggagctgaataagagagaacgtcagagagagcgctggcattccagacatgaggagctgacctggaaccggaacagtctggacagtgactacgaagagaagcatacagcgctggagaacctgcaggcagagttgacggaatgtgaagaaaatacagaagtgatcactccggaggaaacggagattcaggcgttgaatatggctatggagacgattgaggcactttccggaaacattacggatcaggtaggggtccgtctgaaaaaacgtacatctgagatattaagtgagatcaccggtggcagataccaggaggttctgatggatgaggcactgcatatgtctgtgaacacaggggagcgtatcgtatccattgagagactgagccgcgggacactggagcagatttattttgccctccgtatggcagcaggagagcttttctgcaaagaggaaccgttccctgtgatcctggatgatgtatttggcatgtatgatgaagaacgtcttgcagcggctctcaggtggctgcataaagaaaacagacaggtgatcataagtacctgccataaaagagaaatggaaatcctggataaagagaggattccctatcagaagcttcctatgtgagcttttgcaggaagatttcagcataaagatcaaaagcaaagcagacagcagatgcggatcatggatatccgtctgttacagaaatataaagcggctgcgctttctgagaaactgttatatcgttctcagaaggtgcagccgctttgcgtgcgttatgatttatttatttctcatgctggctcatgtaatttgttacgcagcgtttgattctgtctaccggattcagaaggtggctgacagaggtatcatggttcagcgtatcaatgatcagagcaatatatttgctcatatcgcagctgatgtagtatggcttctcaagaagctccggtgactgataaaccaggttagtagtaaggagcttgtcgaagtagcccttcttgtaagcatcgtcaaatttatcaagcccatcggtaaagaatccgaaggtagagcagatgtaaactctgcctgctcctttctctttcaggagagacgcaatcttaatgatcgtatcaccggaggagatcatatcatcgatcaggatcatatccttgccctcgatctttggtccgaggaattcatatgctgcgatcggatgacggccgtttacatatcttgagtaatccagacgtttatagtacatacccatatcaacaccgaggacattggcgagatagatcgcacggttcatgcttccttcgtccgggctgatcgtcatgaaatgatccttgtcgatatgaagtcccttttcattattaagaagagccttgatgaactggtaggatggctgtacagtctcaaaaccatgaagaggagtcgcattctgtacacgggaatcatgtgcatcaaaggtgatgatattctcaacacccatatcgatcagctcatgaagtgcattggcacagtcaagagactctcttccgacacgtttgtcctggcgactctcatagagatatggcatgatcacgttgactctgcgggcttttccgcctacagcggcgataacacgcttcatatcctggaaatgatcatccggggacataagattcgtgtaaggtccgattggataggataagctgtaatttgtcacatctaccattacgtagatatcatcaccgcggacagattcgttgatggtgcatttaccctcaccggagccgaaacgtggagtcttggcgtcaataatgtaagaatcgcgcttgtatccctcgaatgcaaaggagtccattccaggatactgtctttcggcacgccatttgaccagccagtcattcaccttcgcgcctaatgagctgcagctctgaaggggaatcagtccaagtcttcctaccgggagtgtggaaaaatcttttgtatttacctgtgccattttaatttcctcctaaaaatattttctgtatacggatgtccttcccgatcaacgatatcatctgatagttgctggcaattcgggaaaatgttctctcggaataggtatccgagaaatttttgagcgtcagattcgtggaaatgatcgtggatttcctgcgcatgatccgctcattgagacagagaaaaagctgtgaagatacgaaactgttggtaagctccgttcccaggtcatcaatgatcagaagatcacagtcatagatcagttcctcgtctgtgccggtatcttttcgagaaaaagaattcgcagccatcatatcaaaaagatcgtaggcggaaaagtacaggacacagtgggtggatctgagaagctctcgggcgatgcagtgtgaaagaaaggtttttcccacaccggtatcaccatatagaaacaggttttcaaatttatggtcgaagttctgcacaaagcgctgtgcagtgtcataggcccgtctggctgtttccagggcagacagtcccgtggcttcgttttttattgtagcagaataatagtcaaatgaaaagctgtcaaaattctctttttcgagaatttcattcagattggactgtgcataaagcagttcgatctcagcttttttaaaacaggtgcattttcggctgccgatatagccggtatcctgacagtcagggcaggtataaggcatctcaagatagtctccgggaaagccgtttgcaacaagaagggtgatccgttcatcggaaagctcctggatggctgccttcagatccgaagttcccttttcttcgccgtttaaaaggcgacggactttgtcagcacttaaagttgccacctcgtcatcgatctctttcagacgggggatctttccgtaggcttcggctgtgtgctcctccagaatacggtggttctgtgcctgccggcggctgtattctctcattatagtatcatattgaaaattctgtaaaggcataaagcgctccttccaggttctgttactgattatttaaaagacgtttctcatattccgcaaaatcataatcacgttggtggaaattattgaagcggttgctattctgaggctgagtctggggctgcttcttcctggaaacggatttctcaagctggcgttttttgtgtgcggcatccagaagccggatatcctccagcgtatgtacgtttttctttttccagccggagaggatcttatctgcatattggaaactgggctgtccggtggaaaggacagtacggctgcaggcttcctggatcagctccagatcaaaaccgtaggtcttgcgccaggtatcaatgtaagtgatctcgttatcaacaggattgcggccgctgatccccatagctttcaggatcgtgtaataatccttggaaaaacgggagctggcatcccgggccatctcgacggtggtgatgccgtcttttgcccaggcgagtgcaacagtttcaatataacgcatactcttgcggcctctggaaacacagtattccaccagatattcgatgagatccgcagacatatggagctcatcatagaaaaaaaggatcttctgcatttctgtaggcgtcagtgttttggtcagatactgctctgtgatatagagaagctgactgatctcttcgttttgcttaagttctctgatccggtcaggagtgagactgagaatgtaatcagcggagcttgggactcccggatccgtgttcccggaaacggaagcagaattgccggaaccggtgaaagtatccacggaagcgctgctctctctatgaccggtatccgcaaagggttccagcaaagtgatcccggaaagcttctgatctgcagtataggttaatgcgatcagtttctcaccttcccagtatttcagcgcacgggaaatatctctttccgtgcagaaaaggctgtctgccatatgctccaggctgaaagaagaaggagcggcagataccatccggagaaggtagatatatacctttacgaactccccgttggcacgaggcatgaaattgtcaataaagcgattggaaagaatcgttacctccagttctgaggaattctgaagtgaaatcaggctcatgatcagcagctccctttctaaaatacagcagatatttcaggtgatatccaaaagtccgccatgctaaaaaggattatagcacaaccgcttttacttgagaatagtctattttcacagaagttgtgcaccaatttccatgtggaaaatgtggatagtgtggaaaactttgaggataacattatcagcaactaacaaaaaccttaattttgtaagaaaaatgcggtatttgttgaatttggctgttgaattatgtcaagtaggttatacacaaaaaaatccacatgccaggcacgtctgaaatgtgcataagcatgtggataatgtggataattattttccgagaaggtgttctccaatatttacaacgtctccggcgcccatagttatcaacaaatcaccatgtgcacaactttttaagaggaagctctcgatctcatcaaaagtcgggaaatattcgcagggggttccaagttcctggatctgtttctggagatcctgggaagaaataccaagattgtctgtttcacgtgcggcataaatatcagccagtacaacatgatcggccagagtcagcgcttttgcaaattccggaagaagagctttggtacgtgtgtaggtatgaggctggaatacacaccataccttctgatgcggataattctttgcagcatgaagggttgcctcgatctcggttggatgatgcgcgtaatcatcaatgatggtgataccgccgatctcacctttatactggaaacgacggtctgtaccggtaaagcttccgagacctttgacgatcacatcatccggaaggtccagaaggcgtcctacggcaatggcggccagtgcattggatacgttgtggatacccggtacacgcagataatagctgccgatctttttgccccggaagagaacggagaaggaaggatgtccgtatttatcccaggtaatgtctgctgcggtgtaatcggcatcgtgctccagaccataggtaagaacattgcatggaagctcccgggtgatcgtctcatactccggtgtgtcggcgttgatgatcagagtaccgtcagcagggagaagctctgcaaatttccggaaggaatggcggatgtcatcgatgtccttgaagaaatccagatgatcggcatccatgttcaggatcacactgatcttagggaagaagcttaaaaagctgttggtgtattcgcatgcctctgtgataaaggtctcagaatttccaacgcggatgtttccgtggatagcaggaaggattccgccaacactgatggtaggatcacagtcaccctcaagaaggatatgggaaaccatggaagtagtagtggtttttccgtgggttccggaaattgcgatcggtgtatcgtagttccgcatgatctgtcccagaagctctgcgcgggtgagcattggaagccctttttctttcgcacaggcaaattccgggttgtccgggtggatcgctgctgtatagacaaccacatctacatcatccttgatgttggaagcgcgctgtccgtaatagatcacagcgccacgttcttccagtgtgcgggtcagcgggctggatttggcatcggaaccggaaatccggaaattttcttccagaaggatctcggcaaggccgctcatgctgatgcctccgatcccgatgaaatgaatatggagcggtttatgaaagtctatctgatacataataatctccttatatatatgttattttcgtagctcttttgtctgttttattataacgccaacagaaacaattgaaaagtggttcttttggctaaaaaagcggttttttccggaatataaaagtaaccagaaaataacatcgaaaaatgttgaaaattaccagaggaatgaaaaaaatgatgagtcttaccaatttataatatacaatagcgataaaaaaagtaaaatacagctaaaataattgtaaaaaatgttcactaatacagtaaagtatgctataatggaataatcataacatacaagaggtgatcgcatgattaagaaagagatgattgccatgctcttggccggtgggcaaggcagcaggttaggagttttgacagaaaaggttgcaaagccggcagtcgcttttggtggtaaatatcgtatcatcgattttccactgagcaattgtattaactcgggaattgacacggtgggtgtgctgacacagtaccagcctctccgcctgaatacacatatcggtatcggtattccgtgggatcttgaccgcaatgaaggcggtgtcacagtccttcctccgtatgagaagagcacaagcagtgaatggtacacaggaactgccaatgcgatctatcagaatctggcttatatggagcagtataacccggattatgtactgatcctttccggtgaccatatctataagatggattacgaagtgatgctggatttccacaaggcgaacaaggcagatattacgatcgcgtgtatgccggttcccattgaggaagccagccgttttggtattatggttactgatgagagcagccgtattactgagtttgaggagaagccggagcatccaagcagcaatcttgcatccatgggtatctatattttctcatggccggttctgaaggaagcactgatcgccctgaaggatcagaatggctgtgacttcggtaaacatatccttccgtactgtaaagagaaggggcagcgcctttttgcttatgagtacaacggctactggaaagatgtaggaactcttggttcttactgggaagcaaatatggagctgatcgatatcattccggagtttaatctttatgaggaattctggaggatctacaccaagggagatgtgatcccgccacagtatatttccgcagatgcagttgtggacaagtgtatcatcggtgagggaacagaaatctatggtgaagtacataattcagtgatcggtccgaatgttatcatcggcaagggcagtgtgatccgtgattctattatcatgaagaatacagcagttggtgagaacgttgttatggataaagccatcgtggcagaagatgttgtcatcggaaataatgttgtgatcggatgcggcgaggaggtaccgaatgttctgaaaccggctgtatattcctttggacttgtggctatcggcgaaaacagcgtgattccggacagtgtcaaaatcggtaagaataccgctatcgccggtgttacaacaaaagaagactaccctgacggagaactggcagccggccaggtaattgcagcaaaggacggtgggaaagaatgagagcgataggtattattttggcaggcggtaataataaccgcatgagagaattatcaaacaaaagagcaatcgcggcaatgcctattgcaggaagttaccgcgcgatcgactttgccctcagcaacatggcaaattcacatatccagaaggttgctgtgctgacacagtataatgcccgttcccttaatgagcatttaagttcatccaaatggtgggatttcggaagaaaacagggaggactttatgtctttactccaaccattaccagagataacagcttatggtatcagggtactgcagatgcgatctatcaaaacctgagctttttaaagaacagtcatgaaccctatgcggtgatcgcttccggcgatggaatctacaagctggattacaataaagtcctggagtatcatatcgcaaagcgagcagatgttaccgttgtatgtactacatgcaaggatcagagccaggttgagagatttggtgttcttcgcatgaatgaggactgtcggatcgaggaatttgaggagaaaccgatcgtttcctcctataatacggtatctactggtatctatgtcatccgaagaaggcagctgatcgaactgatcgagcgtgctgcccaggaaggaaggcatgattttgtaaatgatattcttatccgttacaaaaatctgaagaggatttacggatataagatcgataactactggaataatatctctactgcagaggcttattatcagacaaatatggatttcctgaaaccggagatccggaactatttcttcaaacaggagccggcgatcaaaaccaagatcgcggatgtacctcctgctaagtacaatccgggtgcaactgtgaagaacagtctggtgtccagcggatgtatcatcaacggaaccgtggagaattctgttctgttccgtgatgtatttgtaggaaataactgtgtgatcaaaaactctgtgatccttaatgacgtatatcttggagataatacgcatattgagaattgcattgttgagagccgggataccatccgggcgaattcatattactgcggcgaagaaggagaagtgaagatcgtcgtagagaaaaacgaacgctacgtattataaatgcggaagatcagttttccgcagatacggttagcgaaatgaaaggggcaagtagcaatgaatattacagatgtacgtgtgaggaaggtagcaaaagaagggaaaatgaaggccgttgtgtctgtcacaatagatgatgagtttgtggtacatgacatcaaggtgatcgaaggcgagaaggggctgttcatcgcaatgccaagccgtaaggcaagcgacggtgaatatcgtgacatcgcacatccgatcaattcagcaacaagagagcagatccagacgatcatcctggacaagtatcaggaagtaatggctgaggaagctgagaatgaggttcttatggaggctgcggagtaagagaagcagtttcaggggggggattacatcagggaagtattctcgtagctgatgatctttggattgaaacagcatagaataaaaactgccgttttacagataaatctgtgagagggcagtttttttgtgctccggaaaacaaaaaaaacgcttttcagttcataaaaaattaaattattacgtatttgttacaaaaataaaataaaattattgctttctatgaaaaatgtgttatactagaacccatgaaaggacgaaaggtgtttatatgaagaatagaaaagttttcacattactgcttacaggtatgctgaccctttccatgggaagcaccgtatatgcatcaggtacagacgccgcgattgcagaggcacaggcggagaaacaggccgctgaggagggtcttgcgcaggtacagagcagcatcggcacactggagagcaagaagcaggagctggagagctatctggctgatttaaacgcacagtatgaggatcttaccaacagcatttctgagcttagtatccaggctgctgagaaggaagatgaattaaataaagtaaaaaaagaattgaaaaaagcaaagaaagcttctgcagatcagtatgagtccatgaagcttcgaatcgcatatatgtatgaaaatgccggaacttccgcactggagacactgctttcttccgaaagccttgcagaattcctcaatcgcgcggagaatgcgatccagatttctacatacgacagagacatgctggataaatatgtgagtcttcagaagaatatccaggagaatgagaaaaaggttgagacggagtccgcagagatcgatgatctgatgacggagcgtgcagccaaacagcaggaagtgcagtccatggcttccagcacaagcgatgatattaactcttatgtaaaccagatcagcgccagccaggaagaggctcagcagctgatggcagatatcagtaatgcagacagcagtattaccgctctggtacagcaggcagaggcggagaaggctgcagaagagaaagctaaggctgaagcggcagcagaggctgagagacaggcagcagaagcggcagcccaggaagaagccgatcaggataacgaggacagtgaagaggctgattctgacgatgattacggctatgatccggaggaggatacaaccgagtcttccagcagttctacaagtacagacattgttgtagaggaggaagaggaagcggatgatgtacagtccggaagttccgaagatgtttccgaggacagctcccaggaggaggtttctgaggaggtttccaatgatgagacagcttccgaggagacggaagatgcctctgcggatacgtccgattccggttcttccagtcagggaacatatcttggaaactttacactgaccgcatactgcaactgtgcacagtgctgcggtacagccggcaatcttaccgccagcggaacagttccgacagcaggacgtaccgttgctatggcaggtgttccgtttgggaccaagcttctgatcaacggtactgtttatacggtagaggatctgggaactccttacggacatgtggatatctattgtggaagtcattctgaggcattaagcttcggacttcagtctgcagatgtatatcaggtgggctgatccggaaaaatccataggagaatatttaagagaaacacagcgctgcaggatcgtatgctgatccctgcagcgctgcttttgtatgcatgacgcagatatgtgtttcgtgaagtgtagtgtgtggaaattcacaaatttcctgcaatccggagattttacagatacggcgtacccgggatctccggataggttcccataccgatgagaagctcaaggcctgtctgacggccttccagtacagcagcttttacagcactggcatcaccggagatggcgatgatcacttcattggaatgactggtaccgatattcggagtcatatattgtgtaatggatactgctgcggatttcacggcattatctgccatcacaagaccgatagcagccggagaacctgccatgaaaccaaatgcttcacccagaggtgtgccgaaggctttatggatagcaggacctgcacttgcggaaaaagcaaactccaagtggccggattcgctgatgtagacctcacctgcatatttgttagtcagttccagagccagagaaatggcgtgacgcacgtcggatacatcatttccgccaaggacgatatagtttccatgaccgccccagcccttggtgtctcttggaagttcaatggaaaggacttctgtatttgtggcttttactgcatcgtcaatagctgtgatctgaccggcagcgcctgttcgggaactgaaaagccccagacagtggtattgggtacctacgttcatctttttaagcagagaatcatcaactccggagatcacgagtccgattgtgtcaaggactgcggtccctacaaattcagtccgtgtgcagttggtgctgatgttatgaatatcgtgtatatccatgtggaaaaatccccctttttgctgaaaactcattggtttcagtatagcatcagagaggggaatttgaaagtgaaaattgacaatatcatttgtaaatggcaggtttacatagttgtaaacggcattgtaaaatgtaaacttaaaaaataaaattaagttgacattaaaatcctgctgtgttaaattgttaacagcgaaagagcggatatcatttataaaggacaggaatgatcttccgacaggaaaagcagaaaaggaaagagaggatacagattattatgacaacagtggcagcaggcagaagcaagacgtatgatcttgtttacattgcagtttttgcagtagtgatggcagtttgctcatggatttccattccggcacaggtaccgtttactctgcagacattcggagtatttatggcagttggtgtgcttggaggaaaaagaggaactctggcagttctggtttacgttcttcttggaacagtaggagttccggtttttgcaggattttccggaggcattggagctcttctcggaaatgcaggtggatatatcattggatttatcttttccgcacttgttatgtgggcaattgagcacgtttttggcagaaagccggttgttcagatcatttccatgatcgttggactgatcgtatgctatgcctttggaaccgcatggtttatgtttgcctacacaagaagcacaggtccggtaggccttatggcagttcttggctggtgtgtgttcccgtttatcattccggatcttatcaagatcgcactggcttatgttttatcaggaaaggtacgtaaatatgcaagataaaagcagtgctgcggcatatgcttctgatgagggcacagaggaaatagtcattcctctgcgccctcatcatggtatgtgcctggcgtattttaagggggaaggctacagtaacggttttactgcacatatggccgagatgctgaagatttttctggagggaaagaaaataaggcttcatgtggatacggatgagatctgctctgcctgtccgaataatctgggcggacattgtgaaaccggagataaagtggcagagtatgacaatgccgtgctggaaaaatgtggactgaaggccggacagacattgcacttcagcgaatttacaaaaaaagtccaggaaaaaatccttgcgatggataaacgtaaggaaatctgtggaaactgccagtggaacagtatctgcgaagaacagaagagccgctgggcataaaagaaagcaaaaatatagaaatataaaaaagtatatgatctgagaatgccggaggaaatggcaatggctgttgcatttcctgaaatgatgtcttggaatatatactttttttgtttgaaatattagataataatataaatattttgaaaacaatttttagttgagaaaaaaacaacaataaccgtgaggcttttttgccagatatgtatagacaaataatttaagcattgataaaatgacgatatgttagtttggacaaactaaagcgtgcttgacagagcacttctgcagaaactgacatatgttgaatattctgcagaagaaatttcaattaaccagagcagctgtaaggtcatgatctggtataaagtcgtgtaatataaaagacaaagaggaggacaggtatgcataagtggaagctttttaagaagtcagctgcactcgttctgagttcagcggtgatcgcgtcaggagcgccggtaacggcaatggcgtctgaggcggaagtttttagtgacgtgtcagaagaaacacaaggagagacagcacaggaagaaggagagaacgaggatcaggagtctgtttcccagggccagccggaagttggtgaagctgatattcagtcggaagagccggaagaaagtgatgcagaagctattcaggaagaagtagcagaaatttcagcagaagagattcaacaggaagaggaaccgcagatccaggaggatacagaagaggcattcggtgatggagaagcatttatggcagaagcaggcgaggttcttcaggatgcttctgagatcactgttgcaggagtgaaatatctctggtccatgcagccggtagagggatatacacagataggaacaacaggcgtttatgtaaaagtggcagatggacagaccgctctgaacggaaaactgtacggaacgacaactttaagttattcggaattttatgccggggataccactcaggagagctatgacgctatcacttcggcaacaacgagtaaaaatcagatttttgctaatgaggacagcacagaggtgacctcttccggatatcagatccagggtgtgaagaatgtaagtgttgcagtggacgcggaaacctatgtagatgcacaggcgctgaaagctgcttccaagcttccgagagagggtgtctatacagaggcagcagatattacgctgaatgaagcaccgtcacaggaaacaggacagtataaaactctgaatacagacggaacatacagtgcaacaaaattcgatgtaaaagcaacggtcacagatgcatccgcccagatccaggcaccgtcgatctggggtgattacatgctggtggtaaaagaagccggcacaaaatatctccgcaattccagacagggtgattttgctgtaggcggaaatacactgggagtgatccttgaaactgccagtggtaagaaggtaggacttcgtcatacctatgaaatctgggtacagccctacgaacttgcgttttcagcaggatccgggcttatcggggaaaaaatttcaaaggtgacttatattactccggacggctcctatgtatatgagttcggagacaaagctcctcttgtaaaaaaacagcctgaagcaggaatgaaggtacaggtagcttttgtaaaagaaaatacaacccaggttaaagttgataaccttgacaaatatgaaaaccctaaggtttccgtatactatacaacaggaagtggtcatggtaaaaaaacaacatatgttgtagatcatgcagcggcagagaatggggtggtaacctttgacagcagtgtagccagggccggggatgagatctacacggttatgatctcaagcgacaattatgtggatatgacaaaaaatatcacactgacaggccagccgatcacggtttccaatgtttcctattattgggtaaagggagcgttggatggatatacacagatcccgggaacagatatttattataaggtggcaaatggacatcaggcactgacaggaacactttacggtacggcatctctgtcatacgaggaattttatgcgggagatgcaacgagccgcaaatatgattccgttacatctgccacaaccagaaaaagcactgctttcggaaatgcagatgttcagaatctgacagaaaatggctatgagatcgcaggagtaaaaaaggttaatgtagctacagatgcaaaaacgtatgtagaggcgcagatcctttcagaagcgggagagcttccggaaagcggagtatatacagaaacagcagggatcacactgggacgtactccgacggtagagcctgggcagtataaaacactaaatacagatggaacatatagtgctacaaaatttaatgtaaaagcaactgtgacagatgcggaggcaacactcaaaacatcttctcgctggggagattatgagattgatgtaaaagaaaccagcacaaaatatctccgcaatacaaagagtgattccgattttgcagttaactccgggattcagggaatgatcctggaaacaacagacggcggaaaatatggcatgcgtcatatgaacgagatgtggctgaaggtgtataaggttgcctttgcaaaagatacaggtcttgagggaaaaaccgtaaacaagatcacgtacattatggcagacggcgcgtatgtatatgaatttgcagatggtatttatgttaaaccgcaggcaacagaagagatggctgtttctccggaatttacggacagcacccatgttaagcttgcaaatcttgataaatacaaaaatccgaaggtatctgttttctatacaacaggtgtcggacatgattcaaagacaacatatcttgtacaggatgcagtaactacagatggagtggttgctctggattccactgtagcgagaccggaaaatgaaacctatacagtaagagtttccagtgatgatcatgcagatgtttctgttcagctggtgtatggaacaattgcctttaaagaaaagtcgggaattctttacattggaagttccagacagcttgaagctacaggtgagaactgcaaagatgtaacatattcttccaacaatgaaaaagttgcatctgtggacgcaaacggaaaagtaactgcaaaggcagcgggaacagccgtgatcacggcaacatctgcagcaggaaagactgcacagtacaaacttacggtaaaaactccatctgtaaaaatgaatgcatcagcgaaaacgctttatgtaaaaggatctccagctacggtgacgttgaaagcaacgaccgcaggtgttaccggaaaagtaacctatacaagcagtaaaccatctgttgcagctgtagccgcaaatggaaaggtaactgcaaaggcggcaggtacagctgtgatcacagcgaaatgcggaaattataaagcaacctgcaagatcacagtcaagaagccggctgtaaaagcttcggcttcagcgaaaactgtatttgtgggtggaacaagccagatcaaagtggaaaaaacaggcgttagcggaaaagttacttatacaagcagtaataaatccgttgcagtggtaagcgcaggcggaaaagtaacagcaaaaaaagcaggaacagctacaattacagtaaaatgcggaagctacaaagcaacctgcaggatcacagtaaaaaaaggcagcctgaagatcacatccaaaacagctgtaagtgtaaaagcaaagaaaacaacagccatcaaggcaactgctacttcaaaggcaaagatcacctacagaagcagcaatacaaaagttgctactgtaagcagcaaaggtgttgttaaaggtgtgaaaaaaggaaaagctgttatctatgtaagcagcaacggaatcacaaaaaaagtaacagttacagtgaaataagcatatatttcacctgaatatatttgatatgttataaagaacctttcccaaaactgcttcgggtctgcgaaaatgcatgcccgaagcaggaaaaaagaaaaaattcgatttttttgaaaaattttaattttttctattgacaaagtacagaaactctaatataatagctcttgcagttgagcaaaacacaaacaactgaaacagaataacgaagcgtggctcagtttggtagagcgctgcgttcgggacgcagaggtcgcaggttcaaatcctgtcgcttcgactaaagctttgagaatcccttggttgaggggttcttttttgtgtttgtacatcctggagcttttttcagttgatggaatgatttctctcgattttcatatatattaacgaaaccgaaataccggagggacgtgcgttggctggatatcagcgttttgttgcgtatgtgtacgagtatcggaaaggaaaaaaagatggcagcagcggttatgtgagggtggaggccagagataggaaatgccgtgtggaggttcatctgcgctgcgttggactggagcctggaagtcggtgcagagtgtatgggtttgtgcggcaggaagggttgatggatggtattttgatcggaagctgtgttaccgggcgggaacggatcgagtgcgcactggagacggatacaggggatattggaggcatgggaaaaagtcttcaggagcttggaggactgcttctgatctccgatgccggcggattctggggaacggaatgggatgatcagccgatccggccggagaatttccgcgagtggaagaaaaaaggaacggaatatcagaaggcggcggagaaaaaaggcagagagcgggaagaaaaggaagaagaaaatcaaaaagatggaaccttgccagaagtgcaggaaaatcagaaggagtcagacaggatcatgacggtggaggagattcaggaggatgtattaaagacatcggaaaccggaaatttatatcaggctcccggtccgcatccgccggaaccaccgcgaccaggccagccatcaccgcatccgccggaaccaccacgaccaggccagccgtcaccgcatccgccggaaccaccacggccaggccagccgtcaccgcatccgccgaaaccatcgagaccggagccatctcgtccacttccgggaataccctgtgatgatccctttaacgacggctatttcacagactgcagcaagatcagaccatcggactgcagtgccttatgcagaaaaaacggctgcttctgcagcaaccgttttgtcatgtacggatatcagaatttcggccatcttctgctgtgcagaaatccccggggacagtacatactgggagtacccggtggatacagccagcaggaacggtttatggccaatatgtttggctttccctactttaaggaatgtccggatattcatatcccaggcggaaagggaggatactggtactgttttattaacatctgatcagaaaaatttcggcatccatgcagataagcaaacagttttgcaaatccgcagatcacagctccataccacgaatttctactaccgggatcgtctgagacaggatatcccggtagtttttcatttcttcctcggagcaggcagagaatcccggtatcagaactccatcggaatcccggtaagcctggagataataagcttttgcaccgcttaaccaccggctgatctcctgaaaatctttttcggaatgaagttccctcacaactgttgtacgaaattcataatcaaggtgtccgtccagcagccatccggcagtttcccggatcccatccagatcagcatgtacaccggtaagcacatgatagttggaaggacaggccttgatatccatggcaaccttgttgatcaggtcagctgctgcgagattttttaccacggaggggcgggaaccgttggtatcgagcttcacatcatagcccagttccctgatcctgctgagaaattccggcagctccggtgcaagtgtgggttcaccgccggaaatacagacgccatcgagaatcccctttcttttttttagaaaagccaggatttcctcctgggaatattcaggctgggtgtcaggctctacgacaagagctccattctggcagaatgggcagcggaagttgcagccgcctaagaatatggtacaggctacccttcccggataatccagcagggttgttttgttaaatccacatattttcataggaaaatccccttgtttctcttatttatgatactacaagcatactctcccccgaaaaaagctgcaagcctttttaaccgaatcaagtaagtttcctgcggagctgcgaaaagcagtaagcagagatggggacttgctcatggaagaaaaaaacatataatttatgggctacacctcttggggctgcattgaccttgtcagtgcatctacagcagagctgaaaaacgctacggctacatctacgtggaccgcaacaacgatggaacaggtacactgaaccgttataagaaaaaatccttctattggtataaagatgtgatcgctaccaatggtgagtcacttcacaaataatctggctgcttgactttccggaaaaaaagcagatataatgcattcattgacgcagacaatggagttcgcgagagcttccgttgtctgcgtttttctgttatacaataagaaaacgctgcagaaattagtgtggaaatttctgtggcgttttttgtgttgcaaatatctgttttgcagcagattgacatgaaataccggaaaagctataatcgaacggacagaaggctgagaacagtcttagtttgaacagatagaatcccggagctttttccggaatgtgaagttacaggaggagtaaaaacgtgacagatcaggaacgttttatgaaagaggcaatccgccaggcaaaaaaggcccgtgcattggaggaagtgccgatcggctgcgtgatcgtgcatgagggaaagatcatagccagaggctacaatcgtcgcaatacagataaaaataccttatcccatgcagagcttaatgctatccgaagggcaagtaaaaagctgggagactggcgtctggagggatgcaccatgtatgtaacgctggagccttgtcagatgtgttccggtgcactggtacagtccaggatcgatgaggtggtgatcggctgtatgaacccgaaagcaggctgtgccggatctgtgatgaatcttcttcagatcgaaggctttaatcatcaggtaaagatcacagaaggggtattggaagaggaatgctccgaaatgctttccacatttttcagggaactgcgggagaaaaagaagcaggcaaaaatcctgaagaagcaggaagcagagcgccttgccgggcagacacagtcagagagagcggaacagaacgaaaagtcccgggagatttactcttgacagaatcctgtgaaaatatcaaaataaaatcataaatggatttcactattacagacagaaaatccattcaggtcaaacgaaagtcgttgatacaggaacgacagaaaatggaggaacaaaaaatggaacttgaagctttaagaaaagacatggtagcagcaatgaaggccaaagataaggtaacaaaggaagcagtttccgcactgatcgcagcagtaaaaaaagctgccattgatgagggatgccgtgatgacatcaaaggagagcttgtagacaaagttatcctgaaagagctgaaaacagcaaaagagcagatcgacacctgccctgcagaacgtacagatctgaaagaggagtatcaggcaagatatgatatcattgcgaaatatgctccgaagcagatggatgaagcagagatcaaggcttatatcgaggagaaatttgcagatgttctggaaacaggaaataaaggccagatcatgaaggcagttatgggagatctgaagggaaaggcagacggcaagctgattaatcaggtagttgccggatattgtaaataaaataatagtacaaaaaatcccgccggatcagtcataaatgacggacccggcgggaatgctgtttatatagagatcatatattataaccttttttacgcgcgccgcacctcggaatggtctcacagacgttacctttacagttaactcagcccaggcaccctcacggcacacaagagcttctgcttagtgctgctgcattcctgccctgacacggttcacagattcctgttgcgtaagacccagacgtcaacgccacttataaagggctgctctgcaagatacaagcctcagattggcatcacccctgctgtagcggattgcaggtacagggcaccgctatctccccggctgcgcggaatttaattatagacgctgaagccggatttgtcaaggtacagaccgaaataaatcagttcatattaagtgtacagtactgtaccgccccgtttttggtgttgcgaagggtgaagctgatataggcggactgcttcgcggaaaggtttccgatacggagcgtggaagaagaagccccgctgttaggagcgttgtaattggtactatactgtgtatgggtccggttgttgttgaaagaaacgcctgtgatcttccagccatttgcagcggtgcatttcatgacagcattcttctgtgccttgttggcgtaacgaaaggcgttatgaccggagcttttgaattttccggcaagattgccttttacacctgtgatggagacggatttcaacgggttgacataacgaagcaccttgatggtggaagaataggttttgtttccgaccttgaaggaaatctttccggttccgggctttttaacggcaaaaccgatattgtagaaatgatcggagtgagtgtacggttttgcacccttgcggaaagcctccgtggtacttttgaagctgctggaaccgaaggagtccagtgcgatcacagaaccgccgctgaccactttaacattggatttgagaatgttctgtttagcaggaatattgctgatcgagatctcatcgtatcccaagtcctttccggatgtgggcatataaacgatccgggttttggaataattgatcgctgcactggcggcgagaggagtcatggcgcataccatggctgcggctaataaagcgcaggatagttttttgaggatttttttcataggacgctcctttcctggcgaaaattttctgtaaacatacgaaagttactgataattttattttacgatgagatacaggtaaagtcaatcaatacactcgctgttttcgtgcttttttggctattgtacactgcctgaaaatgctttataatattatattgtgtaaaactctgtgaaaagagaggatacagtagttgttctgcagaaatacgtcaggtggaatatctgtcttatatgcggacagcaacaaataaaatgtgcacataagagggcacagaatggaggacgctatgattaaaagaatcggtctgctgacaagcggtggtgactgtcaggcactgaacgcaaccatgagaggcgttgtaaagggtctgagcaacagcgttgagaaccttgaggtttatggatttgatgacggatataagggactgatctacgggaaataccgtatgcttacagccagggacttttccggaatcctgactcagggcggaactattctcggaacatccagacagccattcaaactgatgcgggttccggatgagaagggactggacaaggttgaggccatgaaacagacttactataagctctgtcttgactgtcttgtgatcctcggcggaaacggaacgcagaaaaccgccaatcttctccgcgaggaaggcctgaatatcatccatcttccgaagaccattgataatgatatctggggtacagatatgacctttggcttccagagcgctctggagatcgcaacaaatgccattgactgcatccatacaacagctgcatctcatggacgtgtatttattgttgaaatcatgggacataaggtcggaagccttacactgaatgccggtgttgcaggcggagcagatgtgatcctgatcccggagatcccatacgatatcaataaggttgtagaagccatccagaagcgtaacaaggcaggcaagcgttttaccattcttgcagtagctgagggagctatctcaaaagaagatgcagagcttccgaagaaaaaatacaaagaaaagcttgcggaaagagcgaagaaatatccgtctgtatcctatgagatcgcagaccagatccagcaggtgaccggaagtgaggtacgtatcacagttccgggacatatgcagcgaggcggagagccatgtgcatatgaccgcgttctttccacaaggatcggtgccggtgcagcgcaggcgatcatggatgaggaatacggtgttatgatcggtgtcatcaacggcaagatcaagagggttcctcttgctgaatgcgcaggcaagctgaagatggtatctccaaaggatcagcttgtaaaagcagccaaacagatcggaatcagttttggtgattaatgaattatgagtcatctggccgccgcgggagtctttccgcggcgactgtggcgaagagaaggagagttttatgagttatactgctctttaccgtaaatttcgtcccgacaattttgacgatgtaaaaggacaggatcatattgtgacaacactgaccaaccagatcaaggcgaaccgtatcggacacgcatacctgttctgcggaacgcgtggtaccggaaaaactacggttgcaaagatcctggcgaaggcagtaaactgtgaacatcctgtaaatggcagcccctgcaatgaatgtgccatgtgcaaggccattcaggcgggaactgccatgaatgtgatcgaaatcgatgcagcctccaacaacggtgttgataacatccgtgagatccgtgaggaagtggcttatcgtccaacagagggcaaatacaaggtttatatcatcgatgaggtgcatatgctctcaacaggtgcatttaatgctcttctgaaaacattggaggagccgccttcttatgttatttttatcctggcgactacagaggcccacaagataccgatcacaatactgtccagatgtcagcgctatgactttcaccggatatccattgataccattgctgccagactttccgagcttctgacagcagaaggggtggaagcagaggagaaggctgtacgctatgtggcaaaaaaaggcgacgggtccatgcgagatgccctgagtcttctggatcagtgtatttccttttatctgggacaggtgcttacttatgataaagtcctggatgttctgggagctgtggatacagaggtattcagcagacttctccgaaaggttctttccggcgatgtgacaggttccatccatgtgttggaggacctgatcacaggcggccgggagctgggacagtttgtatcagattttacctggtatatgcgaaatcttctgcttgtgaagacttccgaaaatccggaggaagccattgatgtttcttctgagaatctgaagcttctgaaggaagagagcgggatgacagatgtggagacgctgatgcgttacattcgtattttttccgatctgtccaatcagatccgttttgcaagccagaagcgtgtattggtggaaatcgcactgattaagctgtgcagaccggccatggagacaaatctagactctgttcttgataggcttcgtgtcctggaaaagcagatggaggaacggcctgtgcagcaggtgatcgttcgggagagcgaggccggtggaaccggggaaccgggggcggcagtgaccggtacagcaacggtacagcagcagaaaccacagaaggcagctcctgaggatcttcagaagatcgtggcaggctggcgtgccatcgtgggtcagactaccggacttttcaagcagtccctgcagcgtgcagtccccaagtataacggagaaacaggagatcccatcctttatgtggaattccaggattttctggggatgaattatgtagacaatccggaggcgaagaaagagcttcaggacattattgctgcccggacaggcaaaagcgtggagatacatatgctggtagccaacaaacatcagcacaccaatctcgcgcagatcacagtagacgatgcacttcgggagaatatccacatggatatcgtagtggaagaagacccagatgaggagtcataaatccgtaaacaaaaaacaggaggaaagtattatggcaaaaagaggtggatttcctggcatgggtatgccgggaaacatgaataatcttatgaaacaggcgcagaaaatgcagcgtcagatggaagaaaaccagaaagctcttgaggaaaaagagtttacagcaacagtaggcggcggagctgtttccgttacagtttccggtaaacgtgaaataacaaaggttacactttccgaggaagcggtagatccggatgatatcgagatgcttgaggacatgatcgcggcagcaacaaatgaggcactccgtcaggttgagtccgagtcagcagcagtgatgtccaaactcacaggcggccttggcggtcttggcggaggtcttcctttctgatggaatattacagcagccatatcaataaacttattgagcagctttcccatcttccggggatcggagccaaatctgcccagcgtcttgcatttcatatcatgaatatgccgaaggaccaggtggagcagctgaccgcctccattaccgatgcaaggcagaatgttcagtactgtaagtgctgttacacgctgacagatcaggagctttgtccgatctgcgccaatcccaaaagggatcacagcacgatcatggtggttgagaataccagggatctggcagcatatgagaaaacaggtaaatttgacggtgtatatcatgtacttcatggtgcgatctccccgatgcttgggatcgggccggatgatatcaaactgaaggaactgatgaagcgccttcagggggatgtaaaggaagttattgtggcaaccaattccagtcttgaaggcgaaacgacagctatgtacatcagtaagctgatcaaaccgaccgggatcaaagtaagccgtatcgccagcggagttccggtgggcggtgatctggagtatattgatgaggtgacacttctccgggcactggaaggaagagtggaactataaccggatcaggtgaaaaattccctgagggattgcaaaaagtgataagcagccaggaaatttccccaggttataaaggaggtgagactggtggcaaaaaagaaagcaacctcatcggatgtggcagcacgcgcaggagtttcccaggcaacggtatccatggtgctgaaccggaaatataatgtttctttttcgagagaaactgtggagcgggtggagcaggcggccagagagcttggctatgagcttcccggacgtcggaaacacaaagctgacagaaaagaaaagctgatcgttgttttctgccccacactcaccagtccctattatgtactgctgcttcaggggatcgaggctgtggccaatgagcagggatatggggtatttatctgcaacacccagcgcgatgcggggctggaagaaaaatatcttcgtatgatgcagaccatgcggccggcaggaatcatctatacctgcaatcctcatccggatttccagcatcagatagaaaagattgcaaaagaaacaccgctggtcatcatcagcaacaaggaaaaaacaaccacggtagatgctatcaatcaggacaatacagtggtaggaaggctgatggccagacatcttcttgatctggggcacacggatgtggcatttatcacgccgccacttaccagacggcagtggcagcgctccaagcgtgtggagggctttgtccgcgagtttgaaaaagagggaaaaaaagatcatgtgctcatcaaggcggcagatgaatccaatgacagaaagatcccgcggatggattccgagtatgccatgggctacgagctgaccatggagcttctccaggaaggacagaaatttacggctatcgcaggacagaatgacatgatggccataggcgccattgatgcgctgcatgaaatgaggatacacgttccgaaggatgtttctgtcatagggtgcgacaatattttttattccggcatccgcaggatctccctgacaaccattgatcattttgttgcgctgaagggaagagatgcctgtgacatcatcatccgtaagatcgacatgaatgataaattttacctggatgaaagacctgccagcctgtataatatcgaatataccccgaagctgatcacgcgccgcacgacggggtatgtaagactggacagaaaccagtctgatgaacagaaaaataaataatgacgcaaaaattattaataataatatatagagagagtttccatgacacatttgaatagaaaccttgttagctacgataattacggcgatattcgaattgaggaaaatggaaagaagctgttttgggtgaaaaaattgacaggcactattaataaaatgttattttattaataaaagatttattaataaaaagcaggtgccttgacccccgcaatgagtttgttataatggaatcatcaagaaaaagaacgaacgtaaacaggaggaaaaaacaatgaaattttttatcgacacagctaaagtagaggatatcagagaagcaaatgacatgggagttatctgtggagttacaacaaacccgtctctgatcgccaaagaaggaagagacttcaacgaggtgatcaaagagatcacaacgatcgttgacggaccgatcagcggtgaggttaaagctaccacaacagatgctgagggaatgatccgtgagggacgtgagatcgcagcgatccatccgaacatggttgttaagattcctatgacaacagagggactgaaggcagttaaggttctttcctctgaggggatcaagacaaacgttactctgatcttttctgctaaccaggcacttcttgcagcaagagcaggtgctacatatgtatctccgttccttggaagactggatgacatctccacagatggcgttgagctgatccagcagatcgctgagatgtttgcagttgcagatatcccgacagagatcatcgcagcaagcgttcgtcatccaatgcatgtcactgcatgtgcacttgcaggcgcagatatcgctacggtaccgttcaaggtaattgagcagatgacacatcatccgctgacagatgcaggtatcgctaaattccaggctgattacaaggcagtattcggtgagtgatcgaaacctcttttatatacaaattccctgtgaacagcagggcactaaaaaggagacattaataacatggataagttagaacttcagaaagttgccaacgaagtccgcaaggatatcgtaacagcagtccatgcagcaaaggccggccatccgggcggatccctttctgcagcagacgtgttcacctatttatattttgaagagatgaacatcgatccgaaggatcctaagaaggcagaccgtgaccgttttgtcctttccaaaggacatacagcaccgggactctattctgtacttgcagagagaggatattttccaaaagaggatctgaaaacacttcgtcatctgggctcctatcttcagggacatccggatatgaagcatattccgggcgttgatatgtccagtggttctcttggtcagggaatctctgcagcagcaggtatggctctttctgccaaactcagtaatgatgactatcgagtatatacattgctgggtgatggtgagatcgaggaaggccaggtgtgggaggcagctatgttcgcaggcttccgtaaactggacaacctggttgtgatcgtagataacaatggacttcagatcgatggtgacattgcagatgtatgctccccgtatccgatcgacaagaaatttgaagctttcaatttccatgtgatcaatgttgcggacggcaacgatatggatcagctgaaggctgcttttgatgaggcaagagctacaaagggtatgccgacagctatcatcatgaaaacagtaaaaggtaaaggcgtttcctacatggagaacgcagtaggctggcacggaaaagctccgaatgacgagcagtatgcacaggcaatggaagatctggagaaggtaggtgaagcattatgtcagaagtaaagaaaatcgcaacgagagcaagctacggcagtgccctcatagaattaggaaaaaaacacgaggatcttatcgttcttgacgctgaccttgctgcagctacacagacaggtatgtttaaaaaagaattcccggagcgtcacattgactgcggtatcgcagagtgcaacatgatgggtattgcagcaggaatcgcttccacaggtaaggttccctttgcaagtacttttgcaatgtttgcagcaggacgtgcttatgagcaggttcgtaactccatcggatatccgaagctgaatgtaaagatcggagcaactcacggcggtatttctgtaggtgaagatggcgccacacatcagtgcctggaggattttgccctgatgagagtgattccgggcatggtcgttgcaagtccttctgatgatatcgaagcaaaagctatggttgctgctgcttacgagcatcagggaccggtatacatgagattcggacgtcttgctgttccggttatcaatgacagaccggattataaatttgagcttggtaagggcatcgttctccgcgagggaaaagatcttaccatcatcgcaaacggactttgcgttgcaccggctcttgaagcagctgagaagcttgcagcagacggaatcgatgcaaaagtgatcaatatccataccatcaagcctctggatgaggaccttgttgttgcagctgccaaagaaaccggcaaggttgtaactgttgaggagcattccatcatcggcggtcttggcggagctgtatgcgagtgcctggctgagaaggcaccggtaccggttaaacgtatcggaatccatgatgtattcggtgagtccggtccggcattagagcttcttcataaatacggtctcgatgcagagggtatctataagcagatcaaggagttcgcataatcaagatcaacaggggataagtctgtttctgcaggaagtatcttaaggatcccgcaggcgatcacatctgcaagtgctaccacggtggagagccgggtagtctgcagggtaagctgctccatgattccggcagtatttacaatgccggtgatatggatgtcccctacaggtggaagatctttctgaacaccagcacctgggtaaagtgcaccatttccaatggtcacatagcccaggtgttttttttgtccaagagaagcatctatggcgattacaagggcgtgtggatgaagccttgtgataagcgatgaagttttttccaagttcagggcatggaccgggcaggaaagagtgccgtagacaaaaatatgtccggtttcatgaggatgaagaaggtgtccgatatatgggcctaaacaatctccggtaacacgatcactgccaatgcataaaaacacgatctcagtccattttttaggacagtgaagaatgcattttttcagaagataagcaatctcgccggatgaaccgttttttccggcatcaatgtaaaaagccatgagaaacctcgattcttttttcactctatcatatcctgaaaaaaggaaaaatatgcatggtgcggaatctgtcgctaaattctgtggacagactcttacattctgctaaaatccgcatttttactgtgctatgcttggacagaaggagtgatatgagatgatagaagtcatttataaggaggacacaacagaacaggaagccgcacaggaatcgttttccatgcctagaaatgtaaggcagatcgggctggcgaacggagattacaggatttatatagaagattatgtatacacatttctctgcagcctggcagaagatgaaaagccggaaggccagggaagtgtggcggtacttacaggtgaaattcaatggactgcagatatgacctgtatttttataaaaggtgccattgcagcagacggcatggaggctgcggcagaacatattgacttttcggaaaaactctggcagaaactgcaggaggataaggatcagtattttccggagcaggagatcgtgggatggttttttgcacagcctcagatagcaatggagatcacggagctttttgtgaaagtacatctcagacatttcggaggggaaaagatcctgatgctgatggatcctggagaacgggaggatgcctttttccgttatgatggcggcatgatggcaaaactgagcgggtattatatttattatgagaaaaattctcagatgcagacgtatatgatcgaacgcagccagaaagagggcggagaagcatccgagaaagtggaggacagggctgtcagaaatttcagaaagatcatagacagtaaaaatccggaggaacagggagaagagaaaacttctgttttttcttatgcggctacggtgtgtctggcattggcagttcttgtggctggagtgggcttttatcggaatcagcaggaaaaaacagaggttccggaagattatcgcgctgcttctgcttcggtggtgcagataacacctgcagtaacagaaccggtgcggagtgtatcggtttcgccaaaggcggtgcagacgcagaaaccggtgcaaacacaaaaaccggtacagacgcaggaagctgtgcggggaactccggtcccgacggaaaccatgcagaaaagagaaaaaatctcaataacaccggaacctcgaagttcaaaaaaacagtctgtttcagaagcaacgcaaaaaaaggataataaaacagaagagaaaaaaacagaagagacttcagtggctgcaggaaatcctggagaaacttatgtgatccgcccgggagacaccttgtatcagatcagtctcaaccgctatggtactgtagcggcgatggagcagatctgtgcattaaacggaatttctgccaatgagatcatttatcccgggcaggtaattgtactaccctgatggagtgtgctataataactggaaaaccaattacaaaataaaatacttaaggtaagggatacggttgtgaatatcataaaaaaaatacagaaaaaacaaaagcgtaaaaagctgatgaggcaaaaagccaggcttgcacaggaacaggctgcgcaggaaggcgcttactacaggagaacttctcatcgccgaaggatttcaagaaagggaaaaaaggtgatcacagcggcagtgatcgctgctgcagtctgcctggtttttctctatgcagaaaaaagaagctatcacagctataaagtattaaatacaagcgaacaggaagatgttgtgtccacacagtatgtggacatggatggagatatcctgagatacagtccggatggagtatctgttgtggacaacagcatgaatacgatctggaatgaaacctatacaatgcagaatcctattgcagatgtgaatggaagcagggcggttgttgcagacagcgagggaacatcgctttatatctgcgacaaaaaaggtgtgaccggaactgtaacaacatcttatgctattgtaaaagtgcggatcgcatcgaatggaatggttgcagtgatcctggacaatgatgataatacctggatcaatttttataatccggatggcagtctggtcgcggaaaatctgactaagatcgatgatccgggatatcccatggatgtagcagtgtctgataacggagtgatgatggtaacattccagtatgttgatggaagcaagactaccagctatgtggcattttataattatggggatgtagggcagaatgaggatgatcggatcgtaagtggttatacctatgagaatgtagtgatcccgcaggtggaatgtatcagtgacagtaagtatattgctttgcgagatgatggattttctacttaccagggaagccagattcccaaagaaagcaaaacagtcaatgtaaaacaggagatcgtaagtacatttttcagtgatgacaggattggcctggtatttaaaaacaataataaagatgatctgtatacaatggaagtctatagtatgagcggacagctgaaattccgtaaaaatttcaatattccatatacgactataaaaatgagcggagataatatcatcatgtataacagctcgcagatctgcgtgatgaacaaccgtggcgtacagaaatatgccggaaatgtagatggaacgatccgggatttctttaagatcggatggaataaatatcttatggtactggatacaggcgtcagcaccataaaattcagttaagggggcagatatgaactggacatggcttggactggctgtgctggtcctgcttgccttttccatggtggatggatacaggcatggctttgtaaaagaagtagtatctgcattgcttgttctgatctccgttgctctggtatggctgatcaatccttatgtgaatcagttcatacgtgagaatacgtctgtttatgaaaaaatccagactgccagcggatcatttgtggattctctggcagatggaaaagaaaccatggatgaggaggaacagaaggcgttgatcagcagtatggatattccggatctcctccagaaggggataacagaaaataatacggcattggtgtatcaatatctggcggttaatacatttgcagggtatatttccggatatctggccaatgtagcagtgaactgtctttcttttttggtatcatacatactttcctcaatcctgatccatgtgctggcgtatgccatggatctcctggcaagattgccggtcattcgtgggatcaacaaaatagccggcgccgtagtaggaggcatgaagtgtattgtttttgtatgggtcggaatgctggtacttacgattttatgcaacacggaaatagggcaaaagggtctgggactgatccggggtgatacagtactggattttctttatgataaaaatatttttatccgtatttttacaggaatattttatggtgggtaaaagaaaccgcattttgcagacggaaaagcaccaggatacaggtggtgaccatgtctgtgaaatgcggtttttggcgaaaaaatacgttttttagaaaaaaatgaaatttatgtaaaaaacatgttgacaggtaatggaaaaaatgatattctatcagagttgttaggaacaaattgtttttaagaaacagataaatacatctgctttcagaaaaataaaaaagtagttgacaaaagacagaagatatgataaagtatccaagtcgtcaacaaaacgacaacaaaatcttaactcaaaaatgtttgaaaaaaacttaaaaaagtgcttgacaaacaaaaagagatgagataaaataaacgagctgtctgagagacagacacaacaaaccttgataactaaacagtgaaacacatacgattctcgaaaatttctttacatttaaagaacggtttaaacaaaccaaaagcagtaaaaacgagagatagccaaacggttgtcttgagtaaatgaatcaaacacttcttaagcctttggcttaatcagtgtgagtcgcaattaagttgatgcgagcatcactgaattgctaacacattttatcagagagtttgatcctggctcaggatgaacgctggcggcgtgcttaacacatgcaagtcgaacgggaattactttattgaaacttcggtcgatatgatttaattctagtggcggacgggtgagtaacgcgtgggtaacctgccttatacagggggataacagtcagaaatgactgctaataccgcataagcgcacaggaccgcatggtccggcgtgaaaaactccggtggtataagatggacccgcgttggattagctagttggtgaggtaacggcccaccaaggcgacgatccatagccggcctgagagggtgaacggccacattgggactgagacacggcccagactcctacgggaggcagcagtggggaatattgcacaatgggggaaaccctgatgcagcgacgccgcgtgaaggaagaagtatctcggtatgtaaacttctatcagcagggaagaaaatgacggtacctgactaagaagccccggctaactacgtgccagcagccgcggtaatacgtagggggcaagcgttatccggatttactgggtgtaaagggagcgtagacggatggacaagtctgatgtgaaaggctggggctcaaccccgggactgcattggaaactgcccgtcttgagtgccggagaggtaagcggaattcctagtgtagcggtgaaatgcgtagatattaggaggaacaccagtggcgaaggcggcttactggacggtaactgacgttgaggctcgaaagcgtggggagcaaacaggattagataccctggtagtccacgcggtaaacgatgaatgctaggtgtcggggagcaaagctcttcggtgccgccgcaaacgcattaagcattccacctggggagtacgttcgcaagaatgaaactcaaaggaattgacggggacccgcacaagcggtggagcatgtggtttaattcgaagcaacgcgaagaaccttaccaagtcttgacatccctctgaccggaacttaaccgttcctttccttcgggacagaggagacaggtggtgcatggttgtcgtcagctcgtgtcgtgagatgttgggttaagtcccgcaacgagcgcaacccctatccccagtagccagcggttcggccgggcactctgaggagactgccagggataacctggaggaaggcggggatgacgtcaaatcatcatgccccttatgatttgggctacacacgtgctacaatggcgtaaacaaagggaagcgaacctgcgagggtgggcaaatcccaaaaataacgtcccagttcggactgtagtctgcaacccgactacacgaagctggaatcgctagtaatcgcggatcagaatgccgcggtgaatacgttcccgggtcttgtacacaccgcccgtcacaccatgggagtcagtaacgcccgaagtcagtgacctaaccgcaaggaaggagctgccgaaggcgggaccgatgactggggtgaagtcgtaacaaggtagccgtatcggaaggtgcggctggatcacctcctttctaaggaaaaagtagagtaattgaaatgtgttttactgttgagttatcaaggcaactgaataatgatatttctggtagcgatgcgcttaggggacacacccgttcccatcccgaacacgacggttaagacctaagcggccgatggtactgcactggagacggtgtgggagagcaggtggctgccagatcaaatggggatgtagctcagttgggagagcacctgccttgcaagcagggggtcgagagttcgaatctcttcatctccactgaaatcgaaagatttcaagatgggcttatagctcagctggttagagcgcacgcctgataagcgtgaggtcggtggttcgagtccacttaagcccattggcttagtgataataagccaatcaatattgtaccttgaaaactgcatacatgagatttgattaagttaatcaaatatccttaaacgcaaagtattaagaaattaatgcaaacgcaaagataggaagacatcgatttatctgttattgaacagagtaatcaaacacatgtcggaagatacgagagtatcggaagacacgagaatcaagagaccgcatcacctacgctagggtgatgaagcgaaaggtcaagcaataagggcacagggcggatgccttggcactaagagccgatgaaagacgtgataagctgcgaaaagcttcggggaggagcaaatatcccgtgatccggagatgtctgaatggggaaacccgcatgagcagacctcatgcatccatacgccaatccataacgtatggaagggaacccggggaactgaaacatctaagtacccggaggaaaagaaagaaacatcgattccgtaagtagcggcgagcgaacgcggaggagcctaaaccggtgtgcgtgcatgccggggtcatggactgcatttaagattcagcgaagttaacagaacggttttgggaaagccggccggagagggtgaaagccccgtacgtgaaagcagagctgactgagcaggatccggagtaccacgagacacgaggaaccttgtgggaagtaagggggaccaccccctaaggctaaatactacttagtgaccgatagcgcatagtactgtgaaggaaaggtgaaaaggaccccgggaggggagtgaaagagaacctgaaaccctgtgtctacaagctgtggaagtactttatatgtacgaccgcgtactttttgtagaacggtccggcgagttacgcttactggcaaggttaagcacttcaggtgtggagccgtagggaaaccaagtcttaatagggccagagtcagtaggagtagacccgaaaccgggtgatctatccatgtccaggttgaagctgccgtaagaggtagtggaggaccgaacccacatccgttgaaaagggtggggatgaggtgtggataggggagaaattccaatcgaacccggagatagctggttctcctcgaaatagctttagggctagcctcggtgtgagtcttgcggaggtagagcactgaatttcctagggggcgtcaaagcctaccgaagaatatcaaactccgaatgccgtgtagatatcaccgggagtcagactgcacgagataagttgggcggtcaaaagggaaagagcccagacctacagttaaggtcccaaagtgcgcgttaagtggaaaaggatgtgggatttcgaagacaaccaggatgttggctcagaagcagccatacattcaaagagtgcgtaatagctcactggtcgagaggtcctgcgccgaaaatgtccggggctgaaacgcgccaccgaaactaaggaatctgaaaagattggtagaggagcattgcatgcgggaagaagcagtaccggaaggagctgtggactgcatggaagagagaatgccggaatgagtagcgagatagaggtgggaatcctctaggccgaatatccaaggtttccagggtaaagctgatctgccctgggtgagtcgggacctaaggtgagggcgagagccgtagccgatggacaacaggttgatattcctgtactgcagtatgacagaactgtggggacacgtaaggagagcgggagccgggaatggaaagcccggtacaagcgaggtaccagtatggtaggaaaatccgccatgcaatgggaagacgtgatgtggagtgaattttagtaacgaagcccgtgagccatgcgtcaagaaaagccgctatcgttcatattgtacccgtaccgtaaaccgacacaggtggatgaggagagaatcctaaggccggcggaagaagtattgccaaggaactcggcaaaatggccccgtaacttagggagaaggggtgcctgcgagagcaggccgcagagaataggctcaagcaactgtttagcaaaaacacaggtctatgcgaaaccgaaaggtgaggtatatgggctgacgcctgcccggtgctggaaggttaagaggagaggttagacgaaagtcgaagctttgaatttaagccccagtaaacggcggccgtaactataacggtcctaaggtagcgaaattccttgtcgggtaagttccgacccgcacgaaaggcgtaatgatttgagcgctgtctcggcaatacatccggtgaaattgaagtgccagtgaagatgctggctacccgcgccaggacggaaagaccccatggagctttactccagtttggcactggggtccggtgttgcatgtacaggataggtgggaggctgagaaacggtaacgtcagttgccgcggagccgctgttgggataccacccttgtgatattgggcttctaaccagccgccgtaatccggcggtgggacaatgccaggcggggagtttgactggggcggtcgcctccgaaagggtatcggaggcgcccaaaggttccctcagaatggacggaaaccattcgaagagtgcaaaggcagaagggagcttgactgcgacaccgacgggtggagcaggtacgaaagtagggcttagtgatccggtggtattaagtgggaatgccatcgctcaacggataaaagctaccctggggataacaggcttatcactcccaagagttcacatcgacggagtggtttggcacctcgatgtcggctcatcgcatcctggggctgtagtaggtcccaagggttgggctgttcgcccattaaagcggtacgcgagctgggttcagaacgtcgtgagacagttcggtccctatccggcgtgggcgtaggatatctgagaggagctgtccttagtacgagaggaccgggatggacggaccgctggtggaccggttggcttgccaaagccatggccgggtagccaagtccggaagggataaacgctgaaggcatctaagcgtgaagcccccctcaagatgagatatcccattcttatgaagtaaacccccttgaagacgacgaggtagatagggcagaggtggaagtgtggtaacacatggagctgactgttactaatcgggtgagggcttgaccaagaaacgcaggttaagaattgattcaaagagtttgattaacgatcaacaaacatgtatgtagtttttaaggtacaaaccttagttaaatatttaagtaatcctccttagctcagtcggtagagcatgcggctgttaaccgcagtgtcgttggttcgagtccaacagggggagtttttttgtttcctgtaaatgtaaagtttatgggatttttttatgcttgatctgtgacaggataaggatgtaaaaacgtgcagatataaataagatatatttatatctgcacgtttatttttgtaactacaaatagaaatattgactgttagagataatcaataaatttataaagctatgacagagaaattctggcttatcgaatgaaattagtcatgatcttctgctctgtctccggagcgtcgataccggcctttttaccggcttcaatacattttaacagccatgccatgttattgcctaacgtacgcatgatctggaggccttcagcgtcttttctgacgtcatccggggtattgccgtgaaccattgtccagtagtttccggacacgacaggcatctgatgataggtaaagtatttgatcagaacatccagagtagcagtagtaccggcacgtcttgcggaagcaacagctgcggcaggcttgtggatcatatcctttccggccttggaagcgaatttatccatgaattcgatgatctgtccggaaggagaagcccagtaaaccggagaaccaacaataagggcgtcagcctctttcataatggcagctgcgtcagcaacgttttcctgagaaggatccccggcctggaagatttctgcctccacaccgttcttctttaaggtttctgcgatctctgtaagagctgtataagtgcagccttctttgcgaggactgccgttgagtaataaaactttcattattgtcatcctttcatatgattttttaagtcatcatactttcaattatatacagagaaaaaataatgtcaatgtttgaaaaaaacagaaaaaattttcccgggtagggtttgagaaagaaaatacaaacccttggaaagcccattttataaggcttttcggcctgttttccggctttgtaaaaaaaattgaaatttttcaaaaaaaagcttgcaattataaaaaaggtatggtattatttaattcgtcgctgagggaaatacaaaacagcgaaacataaaaaagaaatatggctccatggtcaagcggttaagacaccgccctttcacggcggtaacaggggttcaaatccccttggagtcacttaaaactaaactggatattcattgactcgattcaacatttggtgtttaatacgccgatgtggctcaattggcagagcagctgatttgtaatcagcaggttatcggttcgagtccgatcatcggctttttggacctttagctcagttggttagagcaaccggctcataaccggtcggtcctgggttcgagtccccgaaggtccattttaaaagttttatattctgtatggcccagtggctcagttggttagagcgccgccctgtcacggcggaggtcgagagttcgagtctcttctgggtcgttcatatttggggtcttagctcagctgggagagcatctgccttacaagcagagggtcataggttcgagccctataggccccatttttgaacaaattaattgaatatgcgggtatggtggaataggcagacacaagagacttaaaatctctcgggggcaactccgtgccggttcaagtccggctacccgcagtatcagtaagattcctttttagggatctttttttgtatcataaaatttattgatgaaaacgggaaaatattcctagcttattggtagggatattgacaaggctattttcccatgatagaatcctgacagttgtaaaacaaatcggacagatataaaaaatatatccgttgtcagtataaatatacatggaaagaatataaggagaagtcagaaaatgctgaatcagttttcaagaacagaattattaatcggaaaagaaggaatggaaaagctgaaaaattccagagtcgcagtattcggaattggcggtgttggcggatatacggtggaagcactggtcagaagtggcgtaggtaccctggatctcattgatgatgataaagtatgcctcaccaatatcaatcgccagatttacgcaacaagaaagaccgtagggaaatataaagttgacgtggccagagaacgtattcttgaaattaatccggatgcagttgtaaatatccacaaaacattttatgtgccggagacagcagattcctttgatttttcccagtatgattatgtagtcgatgcgatcgacactgtaaccggaaagctgatgctcgtagagcaggcaaaggcttcaggaacaccgatcatcagctctatgggggccggaaataagatggatccaacaggttttatagtgacagatatttataaaacgtccgtctgcccccttgcaaaggtcatgcgccgtgaactgaaaaaaagaggaatcaaaaaactgaaggtggtttactcacaggagaagccaatgactccaattgatgatatggcgatcaactgcaagtctcattgcatctgtcctccgggaacagaaagaaaatgtactcagagacgtcaggtaccgggaagtaatgccttcgtgccttccgtagtgggactgatcattgccggtgaggttgtaaaggatcttattaaataaaaattggatcattctgtgttactgagaacggaatgaacagtaaccattctgtaagaacagatattgcaagtatacttatattgtgcaatatctgtttttttgtgataaaatattttttacagatagttttgtaaataaaagagaaggacagataaagtatggggatcgttgaaaaatttataaaagaaggacagctgacaaaggaagaatatccggaacttctgcacttataccaggatccggatgcggttcgtctgcttcgggaagaggctgtccgtatacagaaaaaatattttggaaataaaatatatacaagaggtctgatagaatttactaattactgcagaaatgactgctattactgcggaatccgccgttctaacaggaatgccagccgttaccgccttacaaaggaagaaatcctgcagtgctgcgagaatggctatgagctgggatttcggacatttgtgctccagggaggggaagacccatggtttaatgatgaccggatggttgacatcatccggtccatcaaacagggatatccggactgtgcgatcacgctatccattggggagaaatcaaaagaaagctatcagagatttaaagatgccggagcagaccgctatttactccgtcatgagacggccagtgaggaacattatcgttatcttcatccggagagtttaagtcttgcaaaccgtaaacagtgtctttataccctgaaggagctgggatatcagataggtgccggatttatggtaggtgcgccgggacagacgctggagtatctggcggaagaccttgtttttcttaaagacctgaatccgcatatggtggggatcggaccatttgtcccgcaccatgatacgaaatttgcagaggaaccggcaggaagtgtggatctgacactgtttctgctgtctgtcatccggatcctgcttccacaggtacttcttccggcaaccacagcactggggaccctggaccccagaggcagggaaaagggttttcaggcgggtgcaaatgtagtaatgcccaatctttctccggtgaagaaccgtaaacagtatgagctttatgataacaagatctgtacaggcgaggaagcagcagagtgcagagggtgccttaccagacgtgtggagtctgtaggctatgaaatcgttacagaccgtggagattccccgatgacagattgacacggggtacaaaatactttcttttttcagcgatttaaggtaaaatatcagtaagatcagattgctaaaaaattaacagctggtcagaaataagcggaattttcctgcaaatcggaatgcaggaaaaatgatggagtgcgtaaaatatggaaaaatcagaaaatgctgtgcggagcagacttctggaagcggggaaggaagaattcagagacaggggatttctgaaggcttctcttcgtgcgatctgcaaaaaagcagatgtgactacgggagcgctatatttcttttttgaaagtaaagcagctctttttgaagaaatcgtggaagagacggtagaggatctgaagcggatcatgggagactttacggatcaggaaaaacaactgcatccggaagaatatgacaggatacttatggaatttatctgggaaaacagggacatcgcaaaaatcctcatagatggagctgaaggtaccagatatgtgaatttccgtgaggatgcctgtacgaaaatggagcagatccttaatgaacgttttcaaaaggaatgtggacaagaagttgatcacgagctggtacatatcctggtacagatgaaatttcagggatattgtgaactgctccggggaaactgctccagggaaaaactcctggaaatttccagaattctgcagatatgttccagccagtgccttctggcaattgaggcagaactaaacagaaagcagtaaaaaccattgctcattctcctaaagtatgttatgattaacttggttagttttaacaaaccgagggaggtgtaaataacgtgagatcaaatgaatcatctgaagattatttggaaacgatcctgatccttggaaacaggagctctcttgtaagagctgtggatatcgcggcagagatgggctttaagaaaccgagtgtcagtgttgccatgaagaatcttcgccagaaaaatctcatcacagtagccgacaacggagatatccgtctgacagaggacggacataagattgccgataaggtatatgaacgtcatcagctgatctcttcctggctgatgatactgggagtccaggaaaaaacagcgattcatgatgcctgcaggatcgagcacataatcagtgaggagagctttcaggcattgaaaaaggcagtttatgagctgagggagcagcaggctgtgctccatggagaaaccgcggatcaggtttgatccctgcagcagaagctatcaggaattgacaactgaaaaaataagaatataatggaaatccaggttatgaaatggaggataccaaaagatgaaattactttttatacgacatggagacccggattacacaatagattccctgaccgaaaagggctggaaggaagcggaatttctttctgaaaagatcgcagctcttgatgtcagggatttttatgtttctccgcttggaagagcaaaggataccgcatcctgcacactgaagaaaaacggaagaacagctacagaatgcaagtggctgagagaattcgacgtaaagatcagaagaccggatcttcatggggaaaagatcattccctgggactggcttccccaggactggacgaagatcgaaaatttctacagctttgaccgctggtgggataatgacatcctgcgagagggaaaaatgaaagaagagtatgactgggtcacacagaattttgataaagttctggcagagcatggctatgtgcgggaaggacattattacagagcagaaaaagccaatgaagatacgcttgtgtttttctgccatttcggtgtaagctgtgtactcatcagctatcttctcagtatctctccactggtgatgctgcagaatttctgtgcggcgccgtcatcggtgagcaccattgttacagaggagaggcgaaaagggatcgcgtccttccgtatgagctcttttggagacatttctcatttgtatgcgcatcaggagccgccagcttttgcagctagattttgtgagacatatgataacaaagagcagagacatgactaaaaagcgaaagaaacggctgtaatatttcgtgtttttccggaagaccatggcgtagattgagcgttcatttaggctggggatataaaaacacccatattgcctatgatgaaatatccaaaagcgaacaggataaaatctacgagaacgcaaaggctttcgctaaagaaaacaaagaccgctacgattgcggcggctatatctacactggcgaggggcaggacttaggacagttctgggcgaagctggctgtgggaaatggaaagattcagaaatcttccagtaataccacaattaccagcgacaatgattgttattccctctctggtgcggcttacggtgtctattctgataaaggctgcacgaagtctgttgccacacttacgaccaatcgtgctggcaatactgataccgtggaattaagagctggaacatactatgtgaaagaaacaaaagctccgaaaggtttccagttggataaagaggtctatacccttaccgtaaaggctggtgaaactgccacattaaaggtcagcgatacaccaaaggtcacagacaacttaatcgaacttttcaagattgatatggaaacttcaaacggtacgccacagggtaatgctgctttagagggtgcagagtttgtctggaagtattatgacggatattttacaaaagataacctcccatcagcaccgacacgcacatggacgacaaagaccaaagcggaaaaaggcggtgacggtacaatccattacattacaaaattagcggattcctacaaggtatcgggtgacagcttctatacacaagacggtgctatctgtttgccgcttggaacgattaccgttgaggaaaaagcagctccaaacggttatctgttagacggtgcatatatgcaggcaaacggaaactccgaaaaaatcacaggtgtctatgtagcacagattacagaggacggtgagcttgcaaaattaagcggatataaccagtattccgtatcggacaaggttatccgtggcggtgtgaaaatccaaaaacgtgaccttgaaacaaaagaaacaaaaccgcaaggcggtgcagctttgaaagatactgcctttgaaatcacttccttaaatgataaggctgtcttggtagatggtaagctatacaacaaaaatgaggtagtcaagacaatccatacaggtgttgacggtatcgccactactgccgcagacacactcccttacgggcattacagaattgatgaagtaacgccgccagagggatatttaaaggacggtgcggtttcccgtgagtttgatattgtaaataatggtgaaattgttgatttaaccgacgaatcccattctatctacaatcagattaaacgtggtgatattgagggtgtaaaaatcggtgacggtacgcacaagcgtttagcgaatgtgccattcaaaatcaccagcaagaccacaggtgaaagccacatcattgtgacagacaaaaacggtcagttctctaccgctgccgattgggtatcgcataaacagaacacaaacgctggtaagaccagtgaggacggtatctggttcgggacatcagaaccagacgacagcaaaggtgctttgctttatgatacatacgaaatcgaagaattacgctgtgattccaataagggattgaagctgattcctgcttttgatgtggtggtatcaagaaacaaagttgttattgatttaggtacactgacagacgaatacgagccagaaatttctatccatactaccgctaccgataaggtgacaggtgaaaagtcaattgttgctggtaagagcgtgactatcgttgatacagtcactttggacggtcttgtaaaaggtacaaaataccagcttaaaggctgggaaatggtgaagtctgaaaacgcagagcttatcgtaaacggtgagcgtgtggaaaatgattatacgtttactgcaaaggattccaaaatggaagttgagattgcctttacctttaatgccagtgctttaggcggtaaagaccttgtaacttttgaagaattgtacgaccttaccaatccagacgagcctgttaaggtagctgaacataaggacatagaggacgacgggcagacggttacaatcgaagaaagagagattaccattcataccacagctaccgataaggcaaaggaggttgtataaaatggcacgaaagagcaggaaaaacattccggaagtagtcagcagtgcaaccgtccagacagaggtgagcagaccgttccgggcaggattgtatgccagaatttcaatggaaacagaagaaaccttagaaagaggaacgatagaaacccaggtggaactgatgaaaaactttgtggcagatacggaagacatcgcagttgcagaaatatataaggattctgattattctggtacaaatttcgaccgtcctggttttacgcagatgatggaagatatcaagcatggaaaaattaactgtgtgattgtaaaggatctatccagacttggaaggaattatgtagagacaagtaattatattgagcgtgtatttccgttttttcatgtgcggtttcttgctgtgacggatgactttgattctttccgtgagggagtggatctgacagttcccttaaaaaatatcatcaatgagttttattccaaagaccttgcaaaaaagagcagcagtgccaaaaaagccctgtggaaagaaggaaaatttactggtgcatgggaaccttatggatacaggaaatcagaacaggacagacaccagctggtagttgacgaggaggctgccggacatttacgagaaatttttactatgtatatggatggatgcagctacagcgatattgcaaaaagactgaatacagatggtatcctttccccgactttgcagagggaatattataaaacaggcgaaaagccttcaccggaatccaaaccttggaataattatgaagtgaaacgtgtacttcaggatgtccattgtaccggagattctgtatatggaaaatatcagcagagtgtttttcaaggaaacaagcagagaaatctaccggagagtgagtggctctatgctgagaatacccacgaaggaattattgataaagaactgttccggcaggtacaggaaaaaatccgggaatttacggaagcatacaaaaagaagcatcagctgaataatggagccattcggaatcataatttctataccggcaagatcaggtgtgggggttgtgggaaccgcatggtgttgtccagagaaaaaacagggacattttattatatctgtggtgcagatgcgaaccataaatccggaggaaatcagtgtaaggggcacagagtcaaaaaagaatacgtggatgaagacgtccttcgcctgatccagtcacatatgaaagccgtattggatacagagaaactgatccgtgaaatgaattctgcttccagaaaccagacacagtatttgcttctggataaggaagtggggaaacttcggcgggagttgagcaggatcagcaagcgtaaatctgatttatatgaggattattcggaacgtctgattacagaagaagaatacatgcagttttcccgtatctattccaatgaaatagaaaacatcaagaaccgcctggatgtagtattggcggcacaggtacggtattccaaggattatcatatcgaggaaggatggggaaaagtgatacatacttatatgtcaaagcgtaagctgacaaaagaaatggcagatgcctttgtggattcaattattatccatggtaagtatgattatgagatcaagctggtatatgacgatcagtttgcagatttacagaaattaaagaaagagaaggaggcgcagtcaagatgacagatcatagaaaaacagctgtttacatccgtttatccgcagaagatgacaatgtagatggcagagctaaaaaagagagcgacagtgtaacttctcagagaattctgttaaaatcatttgtgattgatcagctgggtgtagatgaggcagatatcctggaatatgtggatgatggtgtcagcggtactcattttaaacggcagggatttcaacagctgcaggatgacatgaaaagtggagaaatcggctgtgtagttgtaaaagacttttccagattcggaagagactatctggaagttggattttatattgaatatatttttccacttctgcagattcgatttatttcgattaatgacagctatgacagtgcagcaagcagcggaatgactggtggaatgaatgtggcattgcagaatctggtatacaatatgtatagcctggatttgtccaagaaaatttcatcagcaatgcagacgagaacaaaaaatggtacacgtcttccggtaaatgccagatatggctataaaaaaggaaaagatggaaggctggaagttgatccggaggctgcaaaagtcgtgaaaatgatttttcagatggcagcggagggaacaagttttgcagatattacaagggaattgaacagacaggcgattgctacttgtgatgagcagaaattatcaagaggggatcaggtgcagttccagaggtttgacacgatcaaaaagaaacactggagccctacgacagtatcggcaatcgtccgggatgagatttatattggaaccagaatctggggcaaaacacgttgcagtatgcatacgggccataaagcagttctgaatgatgaaacagaatgggttcgcctggaaaatcatcatacggcaattatagacagggaattgtttgaaaaagcaaatgaaatgcatccgaaaaagaagagaagtgttgcagaatcacgcaccaattttactctggaaagacgtaaaaaacagccggccttgctgatatgtgccaactgtgggcattctctgttaaaagaaacagagcatctgctgaaatgttcagatgccagaaccaatggtgatcctgtgtgccgaagtctggtgattcgtagggaaccgatggaggagaatatccttgggcttgtccgtcagtatgcagcgtcaatgttgaaaaaaggaaagaaagtatcttccaaaagacaatgtgaatacaaagagatcaatactacagaattgcaaaaacagagccgacagttgacctcggaaaagatgaaactctatgatgattacaaagatggtcgtatagatcgtgattcgtataagcagagagctgaaaagataagtggacagctggatgaaataaaacgaaagatagaagatgcgaagaatagtaaaaagcttcttgaacaaaatgaactttctgataaaataaaactaaaagatttcttgggaattcagaagttcgatacagagaagctgcgtgaggttatcaaggtgatccgtgttcatagtcaggatgaaattgaaatcgaatggaattttgacgatattttttcagaacagagataacttgagcaggacaagaatgacttatcaaaagataataaaggtgctgggactacctgatggaagcgtcagatagtcttcggcagaaaaaaataaaattttttttgtcctatacttgacacatccacatactctaagacatacgttttgtacacgctttgccaacgcaggaatgaacccgaaagcattacagtacatcatgggtcattcaaacatcagcatgacattgaactattacgcccatgctacattcgattccgcaaaatcggaaatggaaaggctgattgcataagtagtaaaaggaatgttttactacacttttactacttttgattgcaatttcatacctagaaatgccgagatatgcaaggtatcttccgaaacaaaaaacgtcggaaaagcccataaatacaggctaaaccgacatttaccaacttatgaaaagataatcaaaaatttatatagtttttccaatcaaaaatttataaaaaagcttttgtcagtgtttatcacatattaagttttatccatggggtaaaaatcattttgtggggtaaaaattggggtaaactgtggggtatgaaaacgcaatagatatgtgttggtaaaatacgattttacaaatatttttgcagttcgcataatatacttaacaagggagccggaaggtaagtgcagatcacccgacccggcgaaataagattagtaaaaaatagctgtcattctcgccaaagaacaggacggctattttttatatgtataagtcaaaattgcaacgatcagtaaagcagttgcaagtataatttgcaattcttcataagtactcataatgatcactcctttctggtaaggtgtccatatcaggcacgtttttattgctttttacctttgaaattaatattgtatacaaaattgtgcgcaattaagggacataaagaggaggcattttcggatttaccccgtttttttaccccggtgagaaagcgaaggtgttttgctacatggtgatttagatggaacagaatgtgagaaaccaatagaaaagatatggtggttcggttataataaagaaaaagcattgaagcaggaaaggagaaaacattatgccggtaacgataaagatgctgttagatcagtataccgaaatattacggaagatatatggaagtcatttaaagacagtaattttatatggatcctatgcaagaggagattatagggcagattctgatatagacataatgattctcctggacttgtcagacatggatattaaacagtatcgtcatgagctgtcaggagaaacttttgacttcaacatggaccatgaccttgatattaaaccgatagcaaaaagccagcagcatttccagaactgggtcgatgtatacccgttttatgcgaatgtagagaaagaaggggtgaaattatttgatgcagcctaatgagaagggaacgcagaaagatttagtattgtatcgtattgaaacctctaaaagcgatatcaaagcagctgaaatccttttggcggcaaaagagtttcgtggagcgaataaccgggcatattatgggatttaccatgcaatatcagctgtgcatgcactggacggtaatgcatataagagacataaagatgccctggcgaatttcaataagaattatgtgaaaacggagatcttcccgagaaaacttggaaagaaaattgttgaatcagaagaaatccgtcatgccagtgattatgatgatttctatatagcgacaagagaagaggctgaggagcagattgagacggcaaaagagctggtatcgcgcgtagaagaatatgtacaggcaagatgggagagaaagtctgaaaagtaaggatgaattttttagaagcattacccgtaaaagatattttgaagattaaagggaaaggctggagctgtaaaagactctggctttttcgatataaaaaatgtgactttatttattgaaaaataacgaattgtaattattgtgctattacataattggcgatatgattaaagagaaatgagaggagaaatagcgatggaggataatattaggacggaaataatcaattctattattaacggagatattgatcatgcaagtgaattagttgaaacgcacaagccggaatatttatataaatatcgttctggcagtgattatgatttagatgcattaagaaaaaagtcaatatggatttcgagagctacggaaatggatgatgatgcagatggtcgtctttatgtatcgaaggactttaaagaaaaatttgaaatagctaaagaattcaacccagaatttcaagaacctaaatatgcagaagcagtttatggaattgaaaacttatctaaacaagggtgttttattagttctttttcagaattaaatgacaatgaagatatgtggaatagatatgcaaatgaaaataaaggtttttgtatacaatatagatttttggatttactttcaccgaatggatatgatttaatctgtcttcctatttcctatgaggataaaaaaccattgggagtagaagaattgacaagtaagcataatatggtttttacaactttgtataaaaagaatattgaaggtatatacggagaggattggaaaggccaacgtgaatggcggtggtcttgctatgaaaagactttaggattagaaaaaaatcaaaatggaatgcttattgcagtgccaaagccaactaggatttttataggtaaaaatgctacggaagatttgatgatacaattagagaatgtagtaaaggatatagggggaaatgttgaattgattaaattatagagatagaaagtaagagagataaaagcactcaacgccttaattggtattgggtgcttttttgtttggaatattctctgtttcaaggaatgttgcttttaaatcgtaaaatttagctcgatatttttctacattgagattagacatatatatttgcaattcatcgagagatttaagaatcgcagataaagaatttaaatctttgattgtattacacccatgtttttctttaccagtaagggaaagcctattcatatagattctgaaggagttgctacacgagaaaacaaagatgatgttattggaaatccggaatgggttcttaacttccttgattgtaaccatgataaagatgggaatataaaaagtgtaaaacaatttgtacataattttgaaatcgttatggataaagatgaccgctttgctgggaaaatacggtttaatgaatttgcacagcaactttatttgtgtggtaatgtgccttgggaaaaagaggacaattgtagagcttggagtagtcatgatgattcagccctgttttcactgatacaggctgactatgggcttaaaagccgacaggactttgcagatgcattgaaaaatgtttctatgcgtaataagttccatccggtaagagaattgctggattcccttacatgggatggaaaagagcatataagaagcctgctgccggagtatcttgggtcagaggattcagattatacataccaggtaatgcgcttatggatgttaggagctgtttcaagagtgtataaacccggaagtaaatttgattatactatgattttacagggctcacagggaattggcaagagtacatttttaaagcaactggcaatggatgattcttggtttaatgattccctggatagtttggattcagacaaggcggtgcagtcccttacaggatcatggatcattgagctcgctgaattaaagtcactggctcggacggctggaggcgttgagagtgtaaaaaggtttttgaccgcaacgcaggataaatataggattccttatgagcggcgggcagacacattttacagacagtgtgtattcgccggaactaccaataaagatgatttcctacaggatgaaacgggaaataggcgtttcctaattgtccagacaggcgttaagaaaccatcaaaaagtctttttgtgccagagattatggatacaatcaagcaggcttgggcggaggttgtgaatatttggaaaaatgagaaaccacaactgctacttccagaatcatgtatgcaggaggcaaaggagcttcaagaggcaaatatggcggatgatggcaagcgagggattattcaggagtacttggaaggtaaaacacaggtatgtgctagggagatatgggaaaaggcattaggggaaaatgtatcacctagaaaatatcagattacagagattaatgatattattgctaaagtgccaggctggaaaaaactgaagagtccgcgtaattttgaaggatatggtaaacagcgcggattccaaaaaacggtgctacaaactgagaatgaaaaggctacaaacttttctgagtttgttccaatatcacggcaagaacagatggaaataccatttgattgaaagcttaaagaagaatgtagctgactttgtagttagattgtagcttgcttaaacccagtatttacaaggctttctacaataactacaaagactacattatatcaaaagaattatataactaagacttcccataccttaaataggcttcgcaccttgaaaattcaatatttcagctaacaaaatagcgatttatgctactatagccacaggatggagcacgctcctcagatattcgggcagacgagcttcaaaatcagcagtaaatgctgccagctgattctcgctgagctttaatatctcctgaagacttgccatgaaagcatccatcagaatgcaaagagatcttgaaaagctaatatccgccatttcatccaccaggaagaagaacagttctccaagcgttctctggtcttcgttttgacgttgctccagagcaagtaacatatatctggtaaaaacaattgcggtatgagcagtcagtgcatcataggaaaggctgtggcattccccgatcagattcagcatggatttgcaggttttgaagaatacttcaatctgccagcgcttgccataaatacggatgatctcttcttcagaaagatccggatctgtgcagaggaacgcaagccagtctttgcgattcgccttgtttcgcacacatacgatttttgccgggaaagggttctctttcccgagcatgatatcaacggaaagcaggtatttcgatctgccgcggcgcttcttgtttctggaatagatttccttgatgttaagctgttcacccttgtatccgtacttgatccggctgcttttcttgatcatggcaatgacatccatgtttctggatttaatggctgtgatctgtgccggattggcaaaccagcagtcgaacaggacatagtccgctgataatccggaagatgtagcagtatcaagaagcgtgagcattacttcaggtgctttggtctgagccagctttctgcgctttccggcaatggtccgcttatcaaatgtatgaacaggcccgatgacattggactcttttgaagatgcgaccagacagctgttaaccgggatcagggtattcccgtcactccaactgagtgtaagcatacggtatccctttttataggtcatatctgtatgatcaaaaacacgggatcccaattctgtctttttacagctggatcggttgaaaaggctgtcatctacaataaagacattggtgcgcttttgatctgtaagattcttcagatcattgttgacaatatctgccgcaagaagagaagtgaaacgaagccagtttgtctttgtggaattcaggaaacggtaaaaggtatttttagagaatccttccttgaaggatccactgcgttgctgcatatacatacttcgccctacgaaaatatttccaagcttatacctcaaaagagaaatggcagggacacctttttctttcgtgccattgcatttagccagtagttttccaatatggtgttttgaaaaaaatctctggatacagtcaagtagagctatctcgttagtgttgttctgtgctataatggacatggcataaatctcctttgcgaaaatggtttttggcaatttcattatagcaaatggaacgtatttatgcctttttattggctgaaatattgaattttcaaggttcaacacactttattggtgtgggaagtcttagttatataaatataagaatataggtataaaagagtatatatataactttaaactttttgggaagattgtagctgttgtttttgtagctttggtagctacgaattttataggcggtaatccgccagaaaggacaataattatgaaaataatgacacaggataaaacacgagttttaaatttcaaaatgacgtatatcagttacgtaagtaagaaccgtatttgtgagggtgattttggtattgcggaatatgcaagtccagaacgcgcgaaagaagtgttgaatgatatgttttaaaagtatgcagcaggagaaaaagcgtatatcatgccggaggagtaaccagtgaacgataaagaagaattaaagcagatatatgacatcttcacggactgctggaggttatacaaaaagctgtatcctccgggcagacctgaagacgatgtatactggcagggagtggtgaaagagatagaagtattacggaagaatcatcatcattcccggttgtgtgaggaccttcttttagcagtagcaaaagatctggaaaacaaagccaaaagaaataatccggttgccagtataaaaaagtaataatatgggattattgccattaaagatcatatcacgatatggaaaatggcgcaaactgtggtaaacatgtaccacaactgtggtcaggtttgatggtaaaatatatataacaggtaatatttcattgttgcggaggtggttttgttggtagttattggtcttgtcacagtgctctcagtggacaaagaatgtagatatgattgaacgtctggaagctatggaagaattgatgtcacgagtagaacaggaacagaaattacagaagagaaaaaaataatagagacatgaattgtataagcttgatttggtagaaaggaatattaaatgccgagaagaaataagcgtgtaacaataagagctacgagtgtgccggaactgcatcagtggctgagagcttgcaaaagggaaaatgccagaaagaaatcacaggggcatagtgggacgaagaaacagacaaaggatttgcatatttaaaggcggtggtgaattatgggaagtccgttgattaaaaggcttgatgctttataccaaagagctcagatggtaatgaaagtgcaggcggatcatgctccgtttgtatccattgctccatggagttttatgaagaatgaatgtatcgtgaaatattatccagagggacattatcagaaaccagagcagataacaactacacttcatgatgcattaatgatagctcaatattattacgaatgtggggtgtatgttcaatttacaatgagcctgtgtatagagtggctgttcctgtatgtgcgtgatgatccccggtattctccgccacaacagaagtcatggtatacaaagaatgttgaagaatatccagaaataaaaactatgttggagagtgaacagcgatttgaaattattggagcattgcgaagaatgcctcagaattttctttttaagggattacctgatgatattaaagatgattacaaattgatggatttttagacaaaaaatgtcgggagtatggggattcgttgacacgataatgcgcacgtaaaagagtttaatgacacgattacgcgcgcatagatattcggagatttcggaggccctaaaaaatatcttacaccttaaaatgcaggggatgatttcgaaacgaactccgagcgaacttcgagaaatgaccttttaggtatcatcgaaccgagagcgaaccgtgagaaatcaagcaacagacgaacaaaacaaaaaggagatttttatggatggatgtaatgaaaatgtaattgaatttatgaccaatgatatcagagcaactttatcattctcgcagggtcggtataagtctgtaatccgtaagctggcagagaagcaccctgaagattgccagatcattgcggataacgaggacggaagcatttgtgctcatgttccagtatcctggcttcggatttctccaccaaggcagtacacagaggaacagcggcagcagatgggagagcaaataaaaaggctaaatgatccgataaaacagtagaagcggtgatgctggcagttaataaaaatcctgctgccgaacctacggttcaataaagaatctattatgagaaatacggtcaggcgctattgctgatttttcagtgttactccaatcgaagccgtgaggaagccgtgaaaaatggaagtaaaacggcgagaaccgggagtgcttgaactgtcgattaacagtcgatatatttgatcgaagcggtgaggaagtggtgagaaattaataaattgatggaacaagatggtatttttggatatagctaaagaaaggcgtacagatgaacgaacttgtttatttaaagaatgatgaagctgtgtgtgatagtttgcaggtggccgagaagtttggaaagaggcatgacaagctgatagccgaaataagaagaatgtatggagagttgataggaaaaagaggtgtccaaaatggtggagcgaaatttttcttcgaatcaacttacgagaatcgtggaaaacgatatcctatgtttttaatgacgagagatggcttttcattgttggtaatgggttttaccgggaaagaggctcttgaatggaaattgcagtatatccgggcatttaatcagatggagaactttatccgtgagaaatctactcaaatgtggattgaaacccggaaggcaggaaagcttaccagaaaggcagagacggatacgattcagaaacttgttgagtatgcaaaggggcagggaagcagtcatgcagaaatgctttatatgacttataccagactggcaaataaaatggcaggaatcaataaaagggacgaagctacggtgatgcagcttaataacttatctttaatggaaaatatcattttgcatgaggttgatctgggaattatgcaagggaagcattatcagggaatatacagggattgtaagaaacgacttgaagcggtgaaagatttggcatacctcgaagcggtataagaagaaaatagggatagtaagagatatgggtgatttgcaacgggaaattgacaaattccggaagctggcatataatatacttatcaagacagccagtaagggaagtcaaggttccccgtcctggcaaatatgtttagctaagatttagccgcctattctttaccagagagcagggcggctatttcttatgtgtgtatgtaaggatagatacaattaagctggctgttgtcaggattatcataaatatctcgtaatcgctcataagcatcccctcctgtcaaggctcaggatcagggaaccacagccgctctactggctgcctggataaatatactatattcagttttagcttattaaaatcccatgttttattgcttgatctttaagtttgagaaaattttttgtttgagcgtttttcattctgctataagcactaaaagatttgggggctagttcaggcaattcataaaaaatatgatagtattctttacgcatcagatttttcttatgaaatgcctcctgctgttttatgtactcaggattatcttttatatgattgatcaattgctgatagtttgcatcatgatcaagtacagaatatatatatttctcagccttgtcagcttcgtcaaacattcccatttctacgtgccattgtactatccggtaaaagtggctttcgtcccaagataaaaaaggatgagcaaacattaattcagtacatttccataaacaggctgaacatcttattttatctttgcgattataaaagcttccggctttcatccttaaaacataatctaaatttccagtaacgccatatccctccattatattttgatgtggcgggaattttggtacaggaatgcgctttaaatcgtccagattctccagatcatattttactccatctgaaaccagatatctggcatcgtaccaactttccttatcggtggggtacactttgtacatttctccgtttttaaaatagatggtttgcgcatcaggaatatcaatggatgatgaattgaaaacatttttgattttgctaaaaaggctcatataatcctcctaataaatggaacagtaaaatatcagatgttgttttattttttaacgatagaaagacgataggtaacgtgatgctcctcagatggtggattctggaaaacttcttcgtcaatctctaaatctgtaaagtcatctgtgtaaattattccgtcaagtagctccacccggataaaatcaggcagattcataatatcatcataggtatataagcgttttgccatgagagcacatcctttcgtgaataataatgattatgcattgtcgcggtccattcgctgatctacagctttttttatatatccgtttacggattcaccagcagcagttgcagcggctttgatttcctcgtatttttccttttgtacatcaagaggaatacgtttaagtttatttttggcatattcaatatcgtattttctttttgcactggtttcactcatggtattagttcctttctggaaagagggcataataaaatacttacactttccctattatgtacatagtataacacaaaaagtcaactatgtacatagtaaaaaatacagaaaaactacgtacatatttatacaaattgtcaatagacatataactacgtacatagtatgctataatcagttcaagggaacagacaacagccgggagagccgaaagcccccaatacttcaagccatatacctgtgagaatcgcaatagggcatatcaatagtcaggaagatgcttgaagggctgagggaccttgaaaagcaaaggaggacagcaatatgaagtacaatctcagcaagatcatgttgaaagcatggaaagtttaccgcaagacaaaggacatccgctttgcagaagctcttcatagagcatggttatctgcaaaggcagaagaaatcaatgcaaagagaatcgaagatgcgaaacatgcagcaggaatcacggaggaaaccaatacctttgctaagtggaaagagcttggttataaggtaaagcatggagcatcagcattattcggatgttctctgatctggggaagcagaggagacggggcaacatacaaagccagtttctttggaaagtctcaggtaaaagcaatttaataaaaaagcccttaccagagcggcaactctgataaaggcaaagcaacccgacaaacgatcaaaattgaggggctgtgcgtattataacatactcattcccctcagacaacaaaagaaaggaacgaaagtatgatatcagtaatggacgttcttgtaatttttttgagtggatttatatctgctaaagtatgtgattatgtacacgaattagaacgagaggagaatgaagcatgagtaaagaaaaaacattaagaacattagaagaaacagaaatgatgcaggacacaggtattccgacgcaggagacagaaggagcaaacgtagttcttgcaacagagattattgcagaccttaagaaacagttagaagatgcaaaggaagaggccaataatctggaaaaagactgggagttttgttcacagcagagacggattcttgcaatgcagacagacattatcgattttacgctgaaaatctttgattataaatgcctcagcatggctttaagctatgtaaaggcagtatacaatcagcagccgccggaagaagaggaagaacaggagggcgaagagtgatgaaaaaatgtacattaacacaggtcccttgcagagaagcaatcatggaagtggttcagagcaacaaaaacagaagatcattacagcacacctacgaactggcaaaactctttcaagtggcttgttctggtaatgaagcacttatgaagctgccagaagtagaccaggaacgtttctggctgattacggatgctttaatgatgaatgatctggaagaccttaagagagtacataaccttgccaattatctgatggtaaggagaataaaagataatacgaaagtggcggaggcatagcatggattataaaaaagaaattgaaaattttctgaatgaaatccagagcgagaaatttctgaaatttttgtataacgtaattgtctcatttaagaagcagtgggggtactaatatggattacaagaaagaaactattgagatattacagaaggtaaatgatgatagcctgcttgaattcttctatagattcattgccagagtaataaaaaatagaggatattaatatggactataaaaagaaaatcatagagctgttagagaaaacagatcatgaccaaacatatacaattttcagatttgtttgtagctttctgggaattaaataagacaatcaggggcggcggactgctgccctattgccaatagaaagacaggtgatataatggcaagaataccatcaggaatgcgaaaaaaagaaaatggtttattcgaaaagcgttttaccgtggagggcaagagatacagtgcctatggtcgtagcacaaaggaatgtgcagagaatgagctcaggatccgtgaggaaattaaggcaggtctgtataattccaacaaaaatataacactggacgcatattttgatgaatgggagaagtcccggagaggaacgatcaaggacagcagcattaaaataaaccggtcgaagtacaataaccatatcaaaccagtactgggaaaaattaaggttcagaaaatagaaaagcgtgcagtggtgaaattgcagcaggatttatcaaagaagctgagtgcatccatgactaatggtgttatagtactgctgaaaacggtgttgaacgcggctgttgatgatgaaatccttatgaagaaccctgctgccagtgtgaaaccattaaggaaggatgaccggccaaaagcgagtgagactattcacagagcattaaccagagaagagcagcaggcgtttatgcaagaagccaagacggaatggttatatgagtttttctgtttttccttgtgtacgggaatgagacttaatgagatcacggctttaaagtggcaggatatagattatatcaacaatgtgatccgggtaaacaagaccgtgagctggaaagagggcggcggtattgaggagactttgccaaagtcagataccagcaatcgtgatattcctatgaatgatacaataaaaaagatcttgcagatgcagaaaaccaaaatgtccatggtttacggggaaatccatgcgagaaagatggatagtaatatctttatcgggagtaatggagctaaggcaatagcatcatccacggtatcatctgctatagataacgttttaaagcggctccggcagcagggtatagaaatcgagaggtttacgcaccatgctttcagagataccttcgcaacacggtacatagaagagggcggaaacatgcagacgctacagaaaatcttaggacatagcagcttggccatgactgcggacttatatgctcatgttcttccgaatacaaagcaacaggaaatgcagcagatagagaatggatttatcggggtggcagttttatgactgctgctccttttttagaataaaatgagcggattggggtaataattggggtaaaacgctgattgctttcgtaagaatggcttaaaatcaaggttttttgtagtttcttaataaattttataaatttattagaaattgtacaaatttctctcacatttatcctgtatgatataaacatcttaagagaacagaagctcttaagaaaaactctttcctttccctaaaatatgtatgaagataaaccaccgttccattggcaagacagagccgacaggacggtggttttgcattgcagaaaaaactgccgaatgacagaggagataaagatttccaatgtttatcggcagcgtttttttgttgtctgagatttattggatatacagcttcaggcacagctacggcctgcgataacggttaaagcaggaatatatttcttggatcctgggcaaggcataaccgcatggaatataagagccttccgagaagaaggacaatccctgccttttcagctgagtatccagataagtgatgatctccggcagagtacgttttccgtcaataagatgttcgcaggcatatttcagaagcaacgccagggatgcagtttgctcggagtcgatcagctgctccacatagcggagatccacttcggtttttccaagagaaaagccatctttgccgtgaaccttggttttcagtctttccggctgtccgggacggctgtggcgggatggagccactttggccttggtcatgatgcgatggctttccggaaggcggaatgcaggggcctcaatgtctgagagaggatattcctgacagagctttttggtgactgctgtgatgtccaccggatgataattatccatctggatcacagtatccgcaatatggaaaaaagctccggagcttccggcaaccaggatagtggagatccctgtcttttcatagagatcccgggcacgttccagaaatggagtgatgggctccttttcccggcagatcacccgctgcatgaaggaatcacggaccataaagttggtggcagaggtatcctcgtcaaggagaaagactttacttccggcctccatactctccacgataccggcagcctgtgaagtgctgccgctggcatcctctgtagaaaagcagagggtgtcttttttatttggaagatcgttgataaaaagagaaatgtccacatctttgataaaacggccgtcctcagagcgaagcttctgggcagaaggatcggtaatgacatattcccggccatcgccggaaatgtgatcgtaaattcccagctccagtgcgttaagtaaggtggatttgccatggtagccgccacctacgatcaaggtgatgccgcagggaatgcccatgcctgtgatggttcctctgtggggcagctccatggaaaccctcaggctttccggagaaataaaaggaacggaatttttcatcgggcgtgaagagatgccgctttccctggggaggatagcgccgtcactgacaaaggcagccagagaacgttttttcagctcctgacggataaatgcctgatcttcggcaaggcagatggcttttctcagcgcttccgggtcaagattccggtaaaaaaatgccttgtgaatacagaccggaagaaaatcgaagaggattttttccagttcgggagagttgatggttctgccattggccgggaaaccgatgaaaaaacgggcagtgatgcctttttccgttatttcacaggcggtacgtgcaagaacctcctgaccacagtggcttactgagatcaggccactttttccggagccctttgcacggaaggtataacggtttacctgctgttcaaactggcggttcagaaagtctcccagtgtgatgcgggtcagggaatccttataatattctgccggaaatccggtgtctcggtgtgaaagcttcacactgatgtgagagggagaggcaaaaggatccccctgcacgtggtcaatggacaaaatataacggtcaaactggtatgcaccccgcagagacttgtatgcaggatagcttttgcggttgatgctgtgaagaagctcttttagctgagcagatgcttgcatgttgtttcctcctttgccctgttggagcatacaggtaaagtctacggtgaaacagaaagccttccgtgtgtaagatacctgaaaattttggatacagggccaattcttaagaactactataacgaatcataaagattttgtaaagaatgggaattgcggtggaaattcgtaaatgtttgacctataatagtagacagattgcagataatatgatgagaaacggcagctgccggaagctataaagaaaggtggaccactaaaatggaaagaagaaatgcgtggctttcttataaggaagcagaagagacagaaatggagaagcttgcgaaggcttacagagaatttttggataaaggaaaaacagaacgtgaatgtgttgcagaaatcgtgaaggaagcagaggctgccggatatgaatctcttgagtcgaagcttgaaaaaggcgagaagattaaggccggtgacaaggtttatgcggtagggatgaagaagatcgttgctctgtttcatgtaggaacggaagagctttccggaggtatgagcattctctgtgcacatatcgactctccgcgactggatgtcaagcagaatcctctgtacgaggatacggatctggcttatctggatacccattattatggtggtgtaaagaaataccagtgggtgacactgcctcttgccatgcatggtgttgttgcaaagaaggacggaagcattgtggagatcagcattggtgaggatgcggaagatccggtactttacatcacagatcttctgatccatctttccggaaaacagctccagaaaaaggcagcagaggttattgagggtgagatgctggatatcctgatcggcagcagacctcttgcagagcttccggatgattccaaaaaggatgcggtaaaacagaatgtgctgaagattttaaatgagaagtatggtattgaggaagaggactttctttcagcagagctggagatcgttccggcaggaaaggcaagagactgtggacttgaccgcagcatgatcgcagcatatggacaggatgaccgtgtatgcgcttacacatcccttgcggcaatgctggagatggaggagacaccgaagcgtaccggctgttgtctccttgtagataaggaagagatcggaagcgttggtgccacaggcatgcagtccagattttttgagaacagtgtggcagagcttctggacggaatgggctgctattccgagcttgcattaagaagagctctccgtaattccagcatgctttcttctgatgtaagtgccggctatgatccggcctatggtgaggcttttgagaaaaagaatgcagcatatcttggacgcggtatcgttcttaacaagttcaccggagcaagaggaaaatccggttccaacgatgccaatgcagagtacgttgcaagagttcgcaggatttttgatgatcacaatgttgctttccagacagcagagcttggaaaggttgattttggcggaggcggaaccatcgcttatattgcggcactttacggaatggaggttatcgacagtggcgtggcagtgctgagtatgcatgctccgtgggaggttaccagcaaggcggatgtatatgaggcatacaaggcatataaggcgtttttacttgatgcataaacagatgtataaatgtgtgtcagttttgaagacattcaggtaatcttttcgttacagatcaatgagcggggttttcccggaaatgacagagcagtctgcctgctgctgttttggcttggagcgttccgacgagaaacagcagtatcccctgcagacttcgctctgtatttttaacctgatcagggaagctctctgtttcaatggcaaaaagcaataagcagaggaggggcttgcctgggactgatttactttacaaggagtaattttattatggaagatgcattggtacgggtagtagatctgtgcaaggtttacaatcccggagaaaatgaggtgcgggcgctggatcatgtggacctggagatccataagggtgaatttgtggctattatcggacagtccggttccggaaaatccacctttatgaacatgctgggctgtctggatgtccccacctccgggaaatattatctgaatggaacagatgtatccacaatgaaggataatgatctctcggtggtacgaaataaggagatcggttttatctttcagggctttaatctgatcgcaaatcttacggcgctggaaaacgtggagcttcctctgatctatcgtgggatcgaccggaaaacaagaagaaagcttgctgtggaatctcttaaaaaagttggacttgagaaacgtatggaccataagccaaacgaaatgtcagggggacagcagcagcgtgtggctattgccagagctatcgcagccaggccgccggtgatcctggcagatgaaccaacgggaaatctggactctgcatccagcagggaaattatggaaatcctgaagggaatgcacagatcaggagaaaccttgatcctgatcactcatgataatgggatcgcggctcaggccagacgtgtggtccggatcatggatggaaaaattgaatcagatacgatcaatgaggaatttgtcgaggaggcttaagaatgaaaaaagggaaaaagattgtgatcggtgtggcagcagtggctgttgtggcaggcggtatttatgcggcatcaggtgcaggccgcgggggatcacagattccgcaggttgctgttaccaaagcggagacaggagatgtggaggagatcgtagatgcaaccggaaccgttgtcagtgatgagcagaagaccttttattctcctgtgaacgcacagatcaaaagcgtatccttcgcagaaggcgatacggtttcaaagggaacgaagctgatagagtttgaagtgaaggatctggagcgggataatcagaaagcagagctgaatgtacagtctggacagtatgattacaaaaattccatcaataaatccaatgaggcccggcagaagcaggacagcgcaaaagcaaaggtttccagtctggaacagcaggtaagggagcagcagaattatctggcttccctgagatcacagctggcgtctgtacaggctcaggctgcggcagatgcgcaggcacaggcccaggcggagacccaggcaaaggcagaggcccaggctgccagggatgcagagactcagagagcgtattcagaagcgctgactacatatcagaatgagacacttccgcagtaccagcaggagctgggacagctgaattccgattatgtaacggcacagaatgcttataatcaggcagataccagttatcagatggcttttgcacagtggcaggcagagcagagcgatgagaatgcccaggcgctggatgaagcggaagcagcaagaagtcaggcagagatcacctgccaggaagcaaaggaagcttatgaggataagaaggccagccagccaaaaatgccggagtattctgattacagcagtagtgcggccggtgattttgttaccgatggagcttcagaggaaacaccggggctgacagatcaggcatctgcggatgcttcttctgcaggaagtacagtggatacttctgccattgagaatgcaatcgaacaggcaacctctgatctggcggatctgcagtcggaccttgcttcccagaaatccattgcagaggcggattctgccagccttacagaagaagagaaagaaaaaatgcgtgtcagcaacaatcttactgagctggatgcaaaatctgcgaaagagctggtagaagaaggaaagaaaggcatttcggcggattttaacggcgtcatttccaaatcagcagtccagcagggcgcagcggcaacacagggaatggagctttttaccctgcagaatacagataaggtcagcgttgatatcaatgtgtccaagtatgactacgataaggtaaaggaaggccagaatgcggacattaccatcggcgacaggaaatataccggcaaggtgactaagatcagtcacattgcgacaaccaacgaaaagggctccacactgatctctgccacagtgagcatcgacaagccggacaaggatatttttctgggagtagatgcgaaggtaaagatctatgcagaaaaggcagaggatgtggtaacgcttccggcaggcgtggtaaatatcggcaaggatggttccttctgttatgtgctgaaggatggtgtgatcacgaagcaggatatcacagcaggaatcagttccgaggattctgttgagatcacagatggcattaaagccggagatgaggtcatcgaggatctgggctccctggaagagggaatgaaggcagaggcagcagcggcagacagtgacagtgcagcagagacaggggagactgccgatgagtaatatttatgaatatatcaaaatggcgatccataatatcatggccaataagggaagatcctttctcaccatgttagggatcattatcggtatcgcatcagtgatcgccattgtgtccatcggtgagggtacgaagaatcagatgaacagtgagatcaatgatatcggcggcggccagatcgctgtttactgcagtgatgatgccatagcagaccaggtctggatcgagtcggaggatattgatgcagtccgggagctggatggcgtggaaggtgttaatgtttcggagtcctatacaggcgagaccgtaaccggaaagggtgattttaatcttacagtgaccggggaggcccaggatgccaagctggtggataatgcttctgtgaagtacggaagctatttcggacagaaggaggtcgaagagggaaaaaacgtctgtgtgatctccgatgccgatgcgaaaaggattttcggaacggatgatgtagtgggaatgacattggacattacctgctatgatctgaccaagacattccgcatctgcggagtcaccacacagaaagagaacggagcctttgtcagctatacttacgatggaatgccggtgaccataaatgtgccttatacggccatggacgactttaccggaagcagcggagaattttatcagatcatagttcaggcggataagagtctggattcccaggcagtcgcagacaagatcataaatcttcttgagagacgtcaccagtgtgccggggatgaatatttccaggtacagagcttccaggatgttatgaaatccatgaaccagatgcttggcatggtgactgcgtttatctcttttgttgcaggaatttcccttctggtaggtggtatcggtgttatgaacatcatgctggtgtccgtcacagagcgtaccagggagatcggtatccggaaatcccttggagcaaaaacctcgtccattatgttacagttccttgctgaggcggcgatcctgacgatcataggcgggctgatcggtattgtgctggggattgcaggcggctatgtgatctgtgcggtgatcagcagcagtatgggaatgaccatcacacctgggatcagtgcgggaaccatcctggcggctacgctgttctcctgtgcagtaggtgtgttcttcggaatctatccggcgaaaaaggcagcgaaactgagcccgatcgaggcacttagacggaattaaaaaactgttgcttttgcatcaaaaatagcaataaaaaatatttttaaaaaaaatcaaaaaaagtttcaaaaaacccttgacattttataggtcttagagtatcatacatattgttgcagcggtgatacgaaatatcacaaaggaaaagcaacaaagatgtgcgtttagctcagctggatagagcgtttggctacggaccaaaaggtcgggggttcgaatcctctaacgcacgtatgaagcctctggaattgttccggaggcttttattttgtgtttcggaaacaggcgaaaaattgtattgacactggtagtgggccagagtagaataaaaaaacagaaaagaaaaattcttgtaaagctgtttgtttgatacaagcagcttttttcaaaagaaaaagtgaacaataacaaaaatacagaatacctgaaacacaggtgaacctatcaggaggaaaaaacaatgccaggatatctgatcaaagatacaacaaaagaggaacgtaaacagatcgtggaggaatccttgggaaatatttccgcgaactgtgatggctgtatggcgaggcttgcggatatgtatcaggattatattgacggaaagaaagaaatccgtgagatcaatatggagttcaatgccaggtatgtccgtggagatatggataaagaagaaaaacgaagctgcccgatgtagcgaacggagattaacagaagcatggatcaaaatgaagtaaaatatgataagctgctgaagatcaaaaccaccggtcgtgacgattccagatcggatcagtactgttatccatatgaaccaacgccgtactgtgtactggaacggctggcgtattgtggatatctggggaaaaagaatcatctgatcgactatggatgtggaaaaggcagagtggatttttttctggcgtggcaggtcagatgccggactacaggcgtggagtacgatgaacgtatgacaaaagccgcagaagaaaacaggcagcgggctgtttccgggacaaaaacatcatttatactggagaatgcagccctttttcaggtgccggagtctgcagacagattttatttttttaatcccttttctgtggaaatactgagaagcgtcatcggacgcatccgggaatcctggtatgaaaaaacaagaaaaatgctactctttttctattatccatctgacgaatatatttcatatctgatgaccgtagcggaattggaattcctggacgagatcgactgtcaggatcttttcgacggaaaaaatcccagggagaggatattggtatttcagatgggagaggagtaaaaacaacatgataaaactgatcgcaacagacgtagacggaactcttgtaaaagacgggaccatgactatcaatccggaatatatgacagtgatccggaagctgactgagctgggaatcacctttgtggtgtgttccgggcggcagtatgacagtgagaggaagctgtttgagccggtgaaggatctggtgtattttgtgtcagatggcggtacggtgatccggaagaatgataagatcctgaaggtacatacacttccggatgaggtttggaaacgcatgcatcatatggtgaaagaaaaaatgtcggaatgtgactgctttattgccacaccggagtgctgctatgcggagaatgagaatggaaggatgttccggtggctacgggattcctatggttatgatatgagaaaagtggatgatctttcttctcttcagggaaaacaggtgctgaaattttctgtctatcacccggaacggtgcgaggagctttgtgcaccgtattttacaccggcatggagggataaggtaacactggcggctgccggaaaagaatggatggacagtactccgccggagggcgaaaaaagtacagctgtcgaatttatccagcaacagttaggaatttctccggaggaaacctgtacattcggagataacctcaacgatattgccatgcttcagaaagcgggaaggagctatgcggtaactaacgccagagcggaagtgcaggcagcagccagggaagtatgtccgtcatacagtgaagatggagttttacagatcctgaaggggattgtttctgaaagcggaaaataataaagatacataaaatatgtgctttcggtaaagaaaagtcaccggccaggggttgacttttaaaaacaattctgttaaattgaaaaaaattgaaaatttcaattccatgagggagtagttcgcacgtaagtgtgatttgtcaacagacccggttttttctgaaaaacctggcaaatcttaaagaatgagactcatgtatgctttgttatattttattgcagcagggcatacatgggtcttttttatgtaacaaaagaatgccggaaagaattttttcagcagggcgggcgacaatgaatctccgggttatgggaaataaaaaaagaaagtgagaagaaaaatggaaaatctggtaaacagttcaccgctgatccttgtgttagtttttcttgtgatcggctttgtgttcctgatgaagggtgcggatttctttgtagaaggaagctccagtatcgcaaaaaggctgaaggtgccgccgatcatcatcggccttactattgtggcaatgggaacatcattgccggaaactgcagtcagcgttacagcgtcactggtcaataacaatgagcttgcggtcagcaatgtggtaggttccaatatttttaatctgatggtagttgttggagtctgttccatcctgacgccgatcctggtacagaaggaaaccatccggagggatattccgttttccatgatctgtgcgctccttcttctggggctggggatcctggcagcaggagatacgatcggaatgagacttggtcatctggatggaatgatcctgctgggattttttgcaggctatattgtggtaatgatccaaagtgccatgaaggccagggcagcagaaaaaaatgtggacatggaaggaatggaagagctggaagaagaaatcggcatcctttcctggccgaagagcatcctttttattgtgggaggcgcacttgccattgcctttggcggagatcttacggtggatgctgccagccgcattgccattgatcttggaatgagccagacactggtgggactgaccattgtttccatcggaacttcccttccggagctggtgacttccgtggttgcagccagaaagaacgaagtggatatggctgtgggaaatgcggtaggctccaatattttcaatatcctgatggttctcggagttgcatctgccatcaatccggtggcactgatccgggaaaatattattgatattgtcatacttatcgtgttctcgctgatcgtgtggatctatgcggccacaaagcagaggatcagccggaaagagggaatttccatggtgtgtatgtacctgatctatgcagggtatattatctggagatagctgctgtgggcatgcagctggtccgacgtggacaatagtatcgtatagggtttatatcaatgcaatttataagaaaagctccaaccgtatcaatatcgggatacagttggagcttttctgcaattatgctcatttgcactcagaagagaaagctttttttgaggattcttctgaagcgctcttctgatgcggggtcatatcatcactgtccgtcatcagatatttgcggacggcaaaaagaatggcgataccgatgatcccgatcagtgtctgtacaggatcgagatgttccacgaccatctgccttgctgttgcaaaaagcaggacttcgacaacagtctgggcggaatggcggcaaagcatttttacaaactccacaccgactacaagggacagtgcctgtgacaggaaactggtaaaaaagctggtgtccatatccatgatggaggtaccggcagttgtaaggatcagacgcagtccggacagtgcgatcacgataatgatcacgatggataatgcgatttctgtgtaacgggctgtgttgtagatcagttcgttaaaatgcttgcggatattgtggttaacggcggttctgtctttcatgagaagttatcctttctttttcgcagaagcgggatgatcgataaagcgggtcgcaaaatagccgaatacgcaggtgatgaccaccatacatggcaaaaacagccagaagcgctgctggctcatggtgttgaaccatggagcattggcttgcaggatcatgatgatgggcatatgccacagatagatcccgtactggttccgggctacgaagtacagcggacgcagaaacctgaaatccatttccggcaggagggagaatcccacaagcagtatactgagcaggaccgccaggatggaatgtgccggataaccggagagagcggtgccataaagcccgtgactgtggtaataaaagatccataccaggatcagtgcggtgcttgcaatagaaaccggaagtccaagcttcagccggtaatcctgcatacgatctccgacctgcttccagaaagcggcagcagccattcccagcacgaaattatccagcgcagagaatacctgacgctcgtatacaaaatatacagagttatccgaaatcccggaattgtggagatagcggacaacggcgaaccggcagataacagtgaaaacaatggatacaatggcagatacaagccagtttttccggacagccttataaaggaacggggcgatcagataaaactgaaagatcacgcccatcgtccacagcgcaccattgatggaaccatgagtcaccggggaaaagttctccgtaaaagtataatacgccaggatatgccgaagtccctcattgctgaacatctgcgtggacataaagatcagaaggaccgtgatacatacataatactggggcataatgcggatgcagcgctttttcataaaagcccgccagccggggagacagcctcgcgcctccgaagaagaaagggaaagatagatcccatatccgcttaacaggaaaaacagtgtaactcctacttcacctccaagagtcagaagtgtgtggatggctgtatgcgactgccatggctgcccggacagaacgtagcagtgatacagcataatgtagaggatcgcccccgcacggagcagatcgatatttttgatacgcttcataaataaatcctttcctgaaaaaaataagtctgccccatgactgaaacgggcagacagagataggtttagtatagcatgaacgtgggagattggaaagctgtcggagggaaccgtaacgaaaaatttattattgcagaatgatgtcattgcactgattgacgacgccggagagactgtagtagaatacaagtatagcagctggggaaaaatctgtcagagataaactggatcactgccgcttccgcaggacttggaaccgctatgggatttttgggaattggtggttcgacaacaggtgcagttgtaagtggtgttacttcgtttgtaagtgattattatgaaaatagagattttacaagtgcggttataaatggtgcggtaagtgcgggaatatcattattttggagtgctgtagataatataggaccaaagcaaaatcaaaaaggatatttgaaatatatgagaaaagattaccatgacgcaaatcgaagaatttcaaatatgaacctttcattcgcagaggcattaccgctacgaagggcagttaatgaagaaaaaaatgaaaaaatgaggcaattaacagtaacgcgaataaatgcttattctagagattattggagtaataggaaggttaattctaatattgcaatacgaaagtatgggagagttattggcgggggatgtgagtatactccgggaaaaggaacgcggtatatgaagtgttataagtatttaggaaagttatattgggtttatgtataagttttgtatgtaaaaatatatgggaaatgtattggtgagaatgggattctcaccaatacaatttgtatgtatttgacgactagggggggatcataataaaccgaaaaagaaaaaataatatacctgaaaaaattttgttattttgtattttatttttgtcatatcgttggatttttgaagatgatagattcacatttgcagtagccggtttgggatatatggcattgactggatgggtattcagatttggcggaagagcggatcaggatatttcttcggaaagtgtagatgaaaatcctctatatgtttatgggatgatgagaaaaaatcgaaaatggttttccggaatcagaggttgttttctgtttcaaatgttgcttttgacagatgttttttttgcagcagtatattcctgttggaaatgttggacgaatagcagtgggaatgatgcgattgaaaaagcgttattatcactgcatattttaatgatagtggggtatgttgaatttctgaagcatagtgttaggattcatgcaagaagctacatgtatatagagaataaaaaaggaatctggatgccattcagttttatctgttacaaatacgagaagttaatagatatcaaaataacttttccagaagaggtcgaagagcgaaacgttgtatttgaaaaggagcttttacataaccagtaccaaaaaaagtcagaatatgaactggacgaaaaaggaaaggtaagttttttcaagaaaaatagaaataatcaggtgaatatctgggcgcttatagatattacagatatggatagaaatgatgttttgttgttaaatgataaatttgcagagttctggatcaatgagatgagcagagaagaaaaaaagaatgatattcgttttacatttgtaatccaggtagatgaaataaatgattacctgcaggaaactttttatgaaagcgggggaatctttatggataagcacagaagccggctgcctgtattatatgtacgcaaacacgatatcctgaaagtaaaatgggctgataataattcaagatatacgaatatcaataaggaaatgagaaaagagttaaagaaaatatatgatgattcggagatagaatccattaatagctgaagaaaggaatcatatggcgaatctgatattgagcattttcgaaagagttataacaatattaatgtttattgcattggcggttgctctcgtatgcaagaaaaaatctaaaaaggtaccgctttttataatcagaccaatttttttggttggcttgttatttatcatgtttcaggcagtatttgtgcagcgaaattttacctcgctggataaagcgattcgggcatatgatgttaaggcgaagccaatagcaaccttgcaggatgagaaatctacatatgttatcatggatgaagatggatctattgaaggaagaatttttccaaaaaatggaaagaaatggaaattgccggattcagcatttttcagaaaaagtatgagctatccttcagaagatgccaatattgatatgagatcaatagaaatacatggagtatggtatattgtaatactcccacattatcttatgggggagaattctatagatgaggttcacgattcggctggaacagaatttttaaaagcggaatatgagaatataacggtatattatggatatctgaaaacgaaaccagacgattactggatttctgtagatggagataaagtagagatcaatctgtgaagcgtcaagattgtaggaaaagaggacataaaaatgaatatttcactatctaactggtggtcgtggggaatcttattgctgttgctcatgatagtggcagttgtggattccaggaaaagaatcccacgaaaaatatccatatttatactggttccgcttttgtctgtggtcatcatatttatgatgtccgaaaatagcaaagaggctgaacaaagtttccatacacttgaggaagcagtaacagcctatgatgatcggtcagatgtcgtggcgacattgcgaggaaaaacttcagcattggttattatggatgatggagatgcgatggactcacagatttttgaaaaaacagaaagcggctggaaacttccggaagattcagagtttcaggacacaaagcgttttacaggagacaggattatagtcgacgtatctaccgtagcagttgatggggaatggtatgttgtggtgtcaccatatccgggaataaaatctcccataacgaatgtatacgattcggaaggaacagaattttccgaagcaaaaggaagcgaaaacgtttactatggatatctgaaaaaatacccagaggactactgggtttctgcaaatggacagaagatggttccaatcgggtttttgaaggattgggtcagaactggatggaaaataataagtagtcattaaaataatagatatcataaaacaaaagattattggatttctataaatggggagaagatatcgcttgagtgaaaaaacaaaacgtttttttctaataacattacttctgacaccagcttgctaccagatcatgccggagatcagaatggcattagttttggcggcaatgggagaagctgtattatcggcagatagaatttgggcaagaaatgaaaggtttccttttgcaaatttatatgatgacaggaatcctctgtatgtacgaaaaatgttgaaaaagaggaaatgtttttccgggataaatggatattttgtagtacagattttgcttttgagttatgttcttctgatgacagcagggtttatttctgatcatataatacatagaagatatcaggaaatcagactggaatttttctggatttactggggaataataatgagccttggtgtagtggaggcatattatatccatatttataagaaaagtttctgctatccgagaaataaaaaaggtatctggatgccattcagctttatcggatatgaaatgcagggactggcaggaaggatactgcctgatccaacagaagaaacggagaaaaatcagcctctggtgtttgaagaatgtctttttaaaagtggatatgctaaaaaagcaaattatatattaaaagagaatgaccaaatctgtttttatcagaaaagaaaaaatcaacaggtaaacttatgggcgatcattgatatagcagatatggaaaaaatgcatatccagcttctgaatgatgcatttgagattttctggtgtaatgagctgaccagagaagaaaaaaagaaagatgtacgttttacctttgtgatccagactgagagaatcaatgatgctataggcaggattttttatgacggatcaggaatacggatgtataaacatcgaagtcgtatggccgttttgtatgagaaaaaacatgacatcataaaaataaaatgtacggaccgtgagtccagatataaaaatatttacagagaaatgagagaagaactgaagcgggtgatcggaagacgggatatagatctgtagactgtatgcaaagggaatgtgaaaaaaatatgctgatcaaagtgatagaaccaattgtatatctgataattattgttaatctggtgatcgctatttcttataaaagaaaatcaaaaaagacaccagttaaggttgttgtaccaattgttatattaggaatcggactctttgtgtgtgatacagtgtatactcaccgaagtttcagttctgtggagaaagccgtggaagcatatggtgataatgctgagatcatccgtattctccagggagaaaattctacatatgttatcatggataacgaaggaacagtagaggggaagatttttccggaaagttctggaaaatggaaattgccagattctatattttatggtacaggcagagagtatcaagatgtaaagataaatattgatatgtcaacgatagaaatcaatggggaatggtatatactggtaacaccgaatgatgataattacgtagtagccgatgtgaaggattctgtgggaacaaaatttctggaagcagaaaataacaaaaatgaaaagatatgttatggatacatggaacacaaaccgaaagattactggatttctgtaaatggagagaagatatcacttgattaaaagaatatgtattagaaaagaaagagacaattatacagaaaaatgatcgacatgttgagcaagtcaatttatttgtgcgtatatgccctggtatttggaggattactgaactctttttatttctatttggcgccggtaggtgtaatggaaattttggcagttctggtaagcctgatgatctcaaatattctatttattcctacggttattataccgtcaagatggaaaaccccttataatgtgccggatagttataactgtcagaatccattttatgtacacggtatgttaaatgacaaaaaggaatcgaaatatgctcttcctatcaggaaaaacggaaagttaaaaagttttttgtttttacgaaaaattatgatcctgtggttgggagtgtattttgtatatctggggatgcagcatgtaaatccaggtataaatagtacagtggtagaaatccttctgaatatctcactggcttttatgatcatggcaagagtatgcatgtggatattttatgtgaaattttataaaaagaattataaatatccaacagataaagaaggaaattgggcgccattcagttttctgtgccagaatatcaatatgtattatgaaaatccggtgtgttacagggatttacagatacattctgatgtaatggaaaaaggttttggaatttatcagtatataaatacgtataaagctcctcgaaatggaaaaacttttttctacagatatgacaaaacagatgagatacatattctggcatatgtaaaaacagatttgtttcaggaagcggatatcggaaaattaaataaagcttttgtagaattttggaaacagtatattacaacgaaagaggaaaaaaaggaaatatatttttcctttgtgatggaagtagaagatgataatcgtattctgaagagcattgtacggaataattcagggataatgatgtataaaagacgataccgtcttggagcggtatataaccgttattataatcgcctggaaatccttccgttatatagatattcgagatataaaaaacaatatgagaaaatgaaaaaagatctgttggattgtctgggcatatcggatgttgtacaggcctgatgactaggggggatcataataaaccgaaaaagaaaaaataatatacctgaaaaaattttattattttgtattttattcttgtcatatcgttggatttttgaagatgatagattcacatttggagtagccttttggggatatttggcattgactggatgggtattcagatgtggcgaaacaccggatcaggatatttcttcggaaagtgtagatgaaaatcctctatatgtttatgggatgatgagaaaaaatcgaaaatggctttccggaatcagagggtgttttctgtttcaaatgttgcttttgacagatgttttttttgcagcagtatattcctgttggaaatgttggacgaatagcagtgggaatgatgcgattgaaaaagcgttattaccactgtatattttaatgacagcggggtatgttcaatttttgaagcatagtgctaggattcatgcaagaagctacaggtatatagagaataaaaaagaaatctggatgccattcagttttatttgttacaaatatgagaagttaatagatatcaaaataacttttccagaagaggtcgaagaacgaaacgttgtatttgaaaaagggcttttacataaccagtaccaaaaaaagtcagaatatgaactggacgaaaaaggaaaagtaagttttttcaagaaaaatagaaataatcaggtgaatatctgggcgcttatagatattacagatatggatagaaatgatgttttgttgttaaatgataaatttgcagagttctggatcaatgagatgagcagagaagaaaaaaagaaggatattcgttttacatttgtaatccaggtagatgaaatgaatgattatctgcaggaaattttttatgaaagccagggaatctttatggataagcacagaagccggctgcctgtattatatatacgcaaacacgatatcctgaaagtaaaatgggctgataatgattcaaaatatataagtatcaataaggaaatgagaaaagagttaaagaaaatatatgatgattcggagatagaatccattaatagctgaagaaaggaatcatatggcgaatctgatatccttagaagtccattacctttaggtgatgggtagttcaatcggtcacaaccgagtcagtcatgaccgaataaaaaatatgtacatatctactccttaaacctgcaaagtgccttctgctgtgctccataaatggagtgatttccgttgaccagataagcgaggatgcataccaggataagggggatggtgtttcgggtgccgaagacttccaggccgatgaggatcggggcgatgagggtgttggtggcgctgccgaatactgcggcgtagccaagtgccccacagatcatcggagggatcccgaggatggaacctaagacgactccaagggaagcgccgatggagaacagtggtgtcacttcgccgccctgaaaaccgatggcaagtgtaaatacagtaaacaaaagcttcagaatccagtcatatccgtagatcgtttctccggcaaaggaagcggagatgagattggttccaagacctgtgtagcgtccgccatggatcacaaacagcagagctgccagtggaatggccatgacaccgatgcggatcagcggatttgagattttttccccgaataatttctttgcttcctgaagaagtacggaaaagcatcgtccggcaagaccaaaggcaagtccgagagcaatgagagagatcatgcttcggagattggtcacagtccaggtgtcctggatatccacagcaaatttttccagtcccaggaaatgagaggtgaaggaggctgtatatgcggcaataagtgccggcagcagcgcatcgtactcaagatatccggcaacgatcacctccatggcaaaaaatacagcggccagtggcgtctggaacagaccgccaaaaccggcagccataccggtgatcagcatgacaggcttattttcccggatatgcagcctgcgtccggcctcgtgggagagtgtagcaccgatctgcacggcaacaccttcacggccggcacttcctccgaagagatgagtgatccaggtgccgagcattaccagagggacaagggccagaggaatctggtctctttttttctgcccggtttcgaagatcagggacatgccctttaagcttaaggtgctgaaatgatgatacatccatacaataagaagtccggccagaggcaggaagggcagcaggcagcgccagtgtgcagtgcgaaaagcagagatcgccagcaggccccggccgaagatagtatctacgatcccgacgcagattcccacgaccactgcaaggacagcatatttcagctgcaggatctgatgttctttttggatagttttttttgtcatagtaactcctttcaatctcccggatcttaaaaatccatcaaaaaaagctggtaaccccgtgcattgcacagaagtcatcagctcattggcggtttcgataaaaatcgggggagaacttcattccctttctgcctgagagtatagcatccgaggctgatatcgtcaatagtcagacggaaatccggagtatcttatttgctacaggtgtgctatgattaaacaaatcggcaggttacgggtgaagcagcaaagcgtaatatgctgcgactaagacttgcacatatgagaatgtaaaaataacggaggagacaccatggaagaatcaagaattgacaaaacgatctatacaggaagaccggagaagatcgagggccgtctggagaaggaaatcgcagtgtacgattttctggacagtcttgggattgaatataaaagagcagatcatgaagcactgatgaccatggaggcctgcgaggcagtggatcagcttctgggagcgcagatatgtaaaaatctttttctctgcaaccgacagaaaacggatttctatctgctgctgatgccgggagagaagccgtttaaaacaaaatttctttccaaacagatcggaacagccagactttcctttgcagacggagagcagatggaggaatatctgaacattacaccggggtccttaagtctgatgggactgatctttgataaagaaaagaaggtacacctggtaatcgataaagaagtcctggatgaagaagatttcggatgccatccgtgtatcaatacttccactctgttaatgaagaccagtgatgtaaaagaaaaaatcctgccggcgctgggccacgaatatcaggtggtcgagctgccgacagaatagaaaatcaacgtatgggtgtaaagtcctttttgttggactctgctatgatgtaatgggggcgctgcttgacctccatataggtttttgctatgtattgtcccatgatacccaggcagaaaagctgcaggccgccgatgaagatgatgacacagatggtggaagcccagccagggaccggatcatcgaagatcagctttcggactatgatggctaccaggaccagaaaggaaaaaccggtcatggtcgttccgaaccaggaggcgatggtcagcggtacctgagaaaaattgatgatgccgctgacggcgtatttaaacagcttccagaagttccatttggtctcaccggctacgcgttcgatatttttgtaggggagccagcaggtgcggaaaccgatccagccgaagattcccttggagaagcggttgtactcactcatggagacgatggcatccaccatactgcgcttcatcagacggaagtctctggcgccgtccacaatatctgcatccgagatcttattgatcagctgataaaatttccgggcaaaaaagctccggataggtggctctccgtcacggctgacacgtctggtggcaacgctgtcatattctccggattccagcttctccagcatttccgggagaagggacggcggatcctgaagatcagcgtccattactgctacataatcgccgccggcattgcagaagcctgcatacatggcagcttcttttccgaagtttctggaaaaagaaagatagatcacatgaggatccttttcggaaagctcttttaaaatctcaagggttctgtctctggaaccgtcattcacaaagatcagctcataatcacagttcatttgcctgaggacagaagtggcttccgggtaaaaaagcggaagggattcttcctcattgaagcatggtataattaaagaaatcatttttggcctcgttttccagatcataaaaaatgatcattttggcggatatctgtagtccgccctggtttcaggttgcttttggatgggtactatcatatcatatttgtccggaatcggctataaaacaggggatttttttcttgcaccgctgtttttttgtgataaactgtaaaaaagacagaaaaaaagataaacaagaggtgtgatatgctggaaaaatttaacagctttatggagaaatggatggcttttgtgacgccggcctgtctgcttacgggggtactgtttccggatattgcaaagcatggcgtgccctatgtgacgtatgcttttgcatttatgacctttatcggtgcgctgaaatccaggttccgtgatgtagcagatgtgtttaagcggccgcttccgctgatcctgatgctgctgatccttcatgtgctgggaccggtggccgcctgcggtctgggacatcttctgttcccgggcaatatgaattatatcacaggaatggtgctggaattttccgtacctgcagcggtgatcagtctgatgtgggtatccatttataatggaaacagtccactgtcactttcgctggttgtgatcgatacgatcctggctccctttctgatcccggcagtattgaagctcctggtgggctccagcgtaaaaatggatactgtgggaatgatgaaggagctggttttcatgatcgctctgccggcagtccttgccatgtgccttaatgaagtcagccatggaaaggttatggagacctggccgaaaaagctggcgcctttttcaaaaatgtgcctgatctttgtggtaacctccaattcctccaaggtttctccttatatgaagcatcttaacggagaacggctggaggtagcagcagcgatcctggtcctggcagcagggggatatgccattggctggatcattgccattcttacaaggcagaataaagcggcaacggtttccatgatctatggttccggaatgcggaacatcagcgccggtgcggtgatcgcaggagcgtattttccggcggaaacattatttccggttatgatcggaacgttatttcagcagatcctggcggctttttacggaagtatgatgcgccgggtccagaccggacagcaggaaagggagaaggagcatggagtttcagcatgaattgatcattcccaatgagggatttccttttaagctttttctttttgaaggaagaaacggaaattatgtaagggaaaaacactggcatacttcgatcgagatctttgcggtgatggaggggagcctttatttctatatcgatgagaaagagtatcctctgaaggcaggggagtttctgatcattaattccaatgaagtacattctattcaggcgccagtacgtaatgagaccatcgtactgcagatcccgctgaagcagttttcggattattttaccgctcagagatttatccgttttcggagcagaaacgaagagtctgaggaaacagacaggcggatggtttctctgatccgggagatgtatcgggtgtacgtatccggggaaacggggtacgaattccgtatcagggcagtgttctatgaagtcctttatcttatggtttctgcatacagggaaacagaggtggaggagaatgcgctgaagatcagccgcagattggatgctttgtcaaaaataaccacttatatgcgggagcattacaaggaggatctcaggctttccggacttgcagccatgttcggatattccgatgcatatctgtcaaggatgttccggaaatatgcgaaggtcaattttaagacatatttacaggatatccgcatggcatacgcctataaggagcttttgcatacagatcataccatcagctctatcgcacttgacaacgggtttgcaagcagcagggctttttccagggaatttgtaaagcgttacgggatcctgccgggaagagtggagcgtcagaatcataaaaatgtcaaaaaagtgctatgaatgagtcaagaaaagcggcgaaaagcataccatgatgtggtatgcttttttcagttcaaaacgaagatacagagaagctgtgaaacagtaattttgtaaggagggttaaatcgtgaaaattcagaaagtaacagatccggctttccgcagatacggaaaggttctggagggatacaatttcggtccgcttctgaaggagatgaagcatacaccggttccggaggatgtggtatatgttccgtcagcagaggagctggaagctctcgatgtggaaaaagagctgaaaaacagagcgtttggtggattacctgtccagatcggatattgcaatggtcacaataaaaagctgaatgccctggaatatcatcggaattccgagatcaatgtagcagtgacagatcttgtactgcttatcggacatcagcaggatatagaagaggatcttacatacgatacctcaaaggtggaggcatttctggtaccggcaggaactgggatcgaggtttatgccacaacgctccactatgcaccgtgtcatgtgaatgagagtggatttcagtgtgtagttgttcttccgagaggaaccaacacagagattgattttccgatgtcaggggacggagaggacggtctgatgacagccagaaataaatggcttatcgctcatgaggatgcgaagatcgaaggcgcattcaacggattgaagggtgaaaatatcacacttgactgattttgggtgaagtgaatagttacaaacgaacaataatatcaccggtggaaaatctgccggatataaaaaggagaatgaagattatgaacaacatgccagaagttaagatcggaatcgttgcagtcagcagagattgttttccggaaagcctttccgtaaacaggagaaaagctcttgtagacgcttacacaaagaaatacgatgcaaaggatatctacgaatgtccggtctgtatcgtagagagtgagatccatatggtccaggctctggaggatatcaaaaaagcaggctgtaacgcactctgtgtatatcttggaaacttcggaccggagatttctgagacccttcttgcaaagcatttcgagggaccgaagatgtttatcgcagcagctgaggaaacacaggataatctctgccagggacgtggagatgcttactgcggtatgctgaatgcaagctacaacctgcagcttcgtaatgtaaaagcctatattccggagtatccggtaggtgatgcagaggactgcgcggatatgatccatgaattccttcctatcgcaagagcgatcgagggattgagcaacctgaagatcatcagcttcggaccgcgtcctacaaacttccttgcctgcaatgcaccgatcaaacagctttacaaccttggcgttgagatcgaggagaactcagagctggatcttttcgaggcattcaacaagcatgaaggtgatgaaaggatcccggcgatcgtaaaagagatggaagaagagcttggtgcgggaaacaagaaacctgagatccttccgaagcttgcacagtacgagctgactctgaaggactgggtaagagatcacaaaggatatcgtaaatatgtaacactgacaggaaaatgctggcctgcattccagacacagtttggatttgttccatgttatgtaaacagtcgtctgacagcacagggcattccggtatcctgtgaggttgatatctatggtacattaagtgagtttatcggacaggtagtaagtgatgatatcgttacacttcttgatatcaataactccgttccgaaggatatgtacaaagaatctatcgaaggaaaattcaactatacacttcaggatacctttatgggattccattgtggaaacacagcatccagcaagctgtccttctgtgagatgaaatatcagatgatcatggcaagatcccttccgatcgaggttacaaacggaactcttgagggagatatcaagcctggagatatcaccttctatcgtctgcagagtacagcggacaacaagcttcgtgcatatatcgcacacggcgaggttcttccggttgcaacacgttccttcggtgctatcggtgtatttgcaattccggagatgggacgtttctaccgtcacgtgctgatcgagggaggattcccgcatcacggtgctgtagcattcggacatcacggaaaagctctcttcgaggtgttcaaatacattggtgtaccggttgaagagatcggttacaatcagccggcaggcgtgagatatccgacagagaatccttggagataattaaaacaggcaggtaagatcatccgtatgtgctgcctgatacaagcaagtccccactcgctgcttattgtttttcgtaacctcgcaggggactttcttgatttggttaaatacgattcagaaaccgcgggctctcaggcgtgcaggcgctgcgaactgagagctgcggtttctgtatttacaggaggaaaaattactatgtattatattggcgttgatcttggaacttccgctgtaaagcttcttcttatggaaggatccggaaagatctgcaacatcgtatcaaaagaatatccgctgttcttcccccatccgggctggtctgagcagaatccggaggactggttcacccagagcatagaagggatcaaagagctcacagaagggattgaccgcaaagaagtagcaggaatcggttttggcggtcagatgcacggtcttgtaactctggataaagatgacaatgtgatccgtccggcgattctctggaatgacggccgtaccggtgaggagacggaatatcttaatacggttatcggaaaggaaaaactttctcagtataccgcaaacattgcatttgcaggcttcactgcaccaaagatcctctggatgcagaagcatgagcctgagaatttcaaaaaagtggtaaagatcatgcttccgaaggattatcttgcctatcgtttaagcggatccttctgcacagatgtatccgatgcttccggtatgcttcttctggatgtgaagaaccgctgttggtcaaaggaaatgcttgagatttgccatatcacagaggaacagcttccgaagctgtacgagagctggcaggtagtcggaaacctgaaagcggaagttgcaaaagagcttggcttctcagaggatgtgaaggttgtagcaggtgcaggcgacaatgctgcggcagctgtgggaacaggaacggttggcgatggccagtgcaatatttcccttggaacatccggtacgatctttatttccagcaaagatttcggagtggatgaaaacaatgcactgcattcctttgaccatgcagatggaagctatcatctgatgggatgcatgttaagcgctgcttcctgcaacaaatggtggtcagaggagatccttaagacaaaggattttgtggcagagcaggcaccgatccaaaagcttggcgagaatcaggtattcttccttccatatctgatgggagagagatctccgcataacaacccggatgcaagaggcgtatttttcggaatgtccatggataccacgagagcagatatgacacaggctgttctggaaggagttgctttcggacttcgagattcccttgaggttgcaagaagcctcgggatccatattgagcgcaccaagatctgcggcggcggagctaagagccctctctggaaaaagatcattgcaaatgtgatgaacctgaaggtggatgtgccggagaatgaggaaggtccgtccatgggcggtgcaatgctggcagcagtaggctgcggtgaatacccggatgtggaaacgatctgtaataagctggtcagggtagtagatacggtagaaccggaaccggagctggttgcaaaatatgaagaaaaataccggaaattccgcaaactgtatccggcaatgaaagagttgttcagataacagccattttcacggataaatattgttctgcttcataggtatggagcactgaacggttaaagatcaggagcatgtcacagctcctgattttttctgtactgtcttggtgtacagcccttgattttcgtaaagacctttgtgtaataattagagtccgaaaaaccggacagtagtcctgattccgtaatagaacaggagggattttccagatattccaggctgcgttcaatgcggtattcctggatgtatccgaagagtgtgatattcatgcattttttgaaaagccggctgcattcgctgggacttaagtggatcaggtctgcaacatcattcaggaggatcttttcagagtagtgttctgcgatataggacatgatctgacggatgcggcggtagttttcttcatcctgaccggatggaagagttgtccgggagatcgtattttcatacaagatcttccagaagtgctgcagtctggcgatgatctcaaattcatacatgggttcccgactgcagtccaggccgatgatgtcacggatatcttttatggcctcggagtgccatttgcaagatagatcaagcggtacggcggacagggaaaagcttcggaggatcggttctgtatatttctggaaaagaaggcttcccgaaaatccgtagatcagtttggggtcaaaggttatggggatatactgacagtcctgatcctgatacatatatccggcatgaagggcattggcattgccaaagattgcctgtccctctttcaggtgaaaggtattctgattgatcttgtagagcatttcgcccttttcgatataggtaagctcgatctccggatgccagtgccacagaaaggaaccggtctcatagccggaaagccgctcgtagcttaccaggaatgggaaggagctgtctccgtgttttttcagttcttttccggcgggatctgtgatgatctgcatggtgttacctccttccttctgtgcgcggatcctgaagtgtatatctgcttttcatagtggaatttattttatcagaaaaggcagaaaatgcaaagggatattccgggatcaccacaaaataatacggttttcacacaaaattgttatggacagaaaagacggaactgttataataaaagtacatgaagcgttactattcactggtaatattccgcgcattgcgaagcgtgttgctgagaacggagtgaacagtaaccatgaagcgtgacagagcggaagattttttcgggttcttccggatctggggtgtaaactatataacaggaggaagaaaaaatgggaacaattaaaattccggcagcagacgtgctgaaaaaaatctatggtgaaacagaggagagcagcgcccgttataccaatcttgctgtgaatttcgagaagaaatatcatcatgacaaggcagagttttttactgctccgggccgtacggagatcattggcaaccatgtggatcataacggcggtcagatcattgcggcaagtatcgatctggataccatcggtgctgcttatccaaacggaaccaatgtgatccatatgatcagtgagggttacaaacaggaagtagttgttgatcttgacaagctcagcacagaaacctatacaaaaggtacagatgctcttgttgcaggtattatggagtatatgcagaaaaaaggctatgctaccggtggatttgacgcttatgtttccaccaaggttattgccgctgcaggtgtaagctcctctgcttcctttgagatgcttgtatgtgcgatcaccaattatttctttaatgaaggtaagctggagtatggcgagtatgcgagagcaggtcagtatgctgagaatgtttactggaaaaaggcttccggtctgatggaccagatggcttgtgctgccggcggcccgatccttctggatttctctgataaagagaatatcagctgtgagaagatcgcattttcctttgaggatatgggctgcagacttgtgatcgtaaataccggtaagggtcatgcagatctcagtgaggaatattcctctattcctatggagatgcgtgaggctgcgaaggctatgggcgtagagcttctctgtgagtccaatatggagaatcttctggcacatgtgaaggatattccgaatgaccgtgctgttcttcgtgcgatgcatttttatgaagagaacagacgtgttgcagatgctgtgaaggctgttgagaataaagacggtgagggattcctgcgtcttcttgaggagtccggtaattcttcctgggagtggctgcagaactgttattctctgcagaattgcaaggagcagaagatcacgttgagtctggcgcttaccaagctgtttctgaataagatcggtgctggtatctgcagagttcatggtggtggttttgcaggagttatcatgtgcgtgcttccgatcgagaacgcagatgcgtatgtggactatatggctcagtatgttggaagggaaaatgtctatccgatgaatatcaggagtacaggggctgttcatgttgagtgatttttgatggcataacgaacgtcatggagggcgattcgtttccgaatgcggctttggcggcatccggaaatgaaccgccctttgcgctgtactatgattttttattttttaatcaaaattttatgatttgtttctgatttaaatttatgggttatggtataatgagaaaaattttaagagagtaataaaaaagaatttgcagaagttttcaaggtgaggtttctggagttgttttgagttttgttttttcattatatttcataagaaaggtttgacatatttatgagcagaagagagtttcttgaggttttacgggggcagctgtccggacagatgacccaggggagagctgcggctcatgtgcggtattatgaggattacattcagtctcaggtccggaacggtcgaagtgaatcagatgttctggcagaactgggggatcccaggctgatcgccaagactttgatcgatacagatgacagtgcagctgtttatgatgagtctggttattctgaagagagctacggtgcagatgattatgcggataatgggacggagagcagtgccggaaaggcaagaagctttaaactggatctgagcacatggtatgggaaggcaatcgtgatcgccattgcagcgttaattgtgatacttttaacaactgttttggtggcagttgctccatttttgataatttttggtatagttttgtatttaatatcctggtacaggaagaaaaaagtgtaattgttccacaacagctgtgaattaaagacaatttccgtgtaatgaaatggattgcttgtgaaaaaagtatttataagatttgcataaaaaatatgtgtttggtcttgatttatagtggattttactgtataatctgggttaacaagttgagattgtgtctgttttgtataaaaacagatgatgccattgagaagagagaacggcagaagatatacatcgaaggatgtgttattttctgccgatttttttatctgttttttagaaaaggtgatcagaatggattgccttattgaagtatgataaattgtataaaatagataaaaaaacaattattatcaaataataattgcttaaaataaataaagaaatattggaaaatagagaaataactgttgattatatacaagaaatgtgttatcatttggtaaaaagttggtaaagataacaaacacgcaaatacaaaggagggtagtgagagggcatttttgacagcagaacgtaaatgagagttttgcttaatgtattggggtaattgctggaagatataacggaaatgtttttcagcagaatgtgtaatgagcaacatgatcagcactgtcaggaggacagagatatcgtgatgatgcagctgatcggtagtacgtaaatttatgaaaagcaggtgatatacaatgaaaagtaaaaaatcttttttcaggacagtggagccttatctctatctggttcctgtaatgatcctttttatactgtttgtattctggccgttcgttaagacgatccagctgagctttgccagaaccacacctcttggtcaggtggcacagtatgtaggacttgacaactatacgaatatttttacagatggaacgttccttaacagtttggtgacaacactgaaattctctgttatgcgagttatcctttctattgtgctcggttttatactggcgatcatcagtacagagaagatcagggcaaagggatttttccgtactgtatatgcacttccgatggctatttccgcagcagcggcatctgtagtgttcatgtttattttccacagctctctgggtatcctgaacagggcgctcggaactcatatcggatggctgacagataagaaatatgcactgatcgcagttacgatcgttagtgtatggatggcgatcggtatgaatttcatttaccttactgcagcgatccagagtgtaccggctgagctttatgagagcgttgccctggatggagcgaatttcttccagaagcaccgccatgtaacgattccgtcaatctctccgacactgttcttccttctcatcatcaatgtcatcaactccgtacaggcatacgcagagttcaagatgatgacccagggcggaccggcagagagtaccaacgttatcgtgtatgagatttaccaggaggcatttatcaacagccgtttcggtgtggcctgttcagaatccgtaattctgtttgttattttgatcatcctgactgcactgcagtttagactggaaaagaaggtgacctactgatgaaagaaaaaccatatgtaaaagtggcgatgtatgcgctgaatattatttttgcaattattattattgttcctgttatctactgtttcaatgttagtatgatggatctgaaggagatctacggcggaaagttctggccgtcccatctgactatcgagaactacacaagagcatttcagcttgcaccgttctttaccttcattaagaactcactgatcgtatccggtgttatcacatttgctcaggtcgtcacaggtgctcttgcagcatatgcttttgcaatgatggagttcaaaggcaaaaaggtcctgttctatattatgctggcaaccatgatgatcccgagccaggcgatcatcatcgcaaactacctgactattgctgactggggtatccgtaatacatacgcagcgctgatccttcctaatgcagcagcagcttttgcggtattcaacatgcgtcaggcattcctgacactgccgaaggagatccatgaggcggcagagattgacggatgtacaaatttcaagttcttatataccatcggtgttccgcttatcaaaccatcactgggtgctctgatcatctatgtattccttcagagctggaactactatctgtggccactgcttgtaacagacagtgtaaatatgagaacggttcagatcggtcttggtatgcttcagggggctgaggcaacagacttccgaccggttatggctggcgctatggttatcctgattccgtcgatccttgtatttatcattggtcagaagcagatgatcagtggtctgacagcaggtgctgttaagggttgatccaatcacataagagcaagtagcaaaaatgttaatttgtccgacctgtattggggcgggtcggaccattataaaaggagggtttctatatgaacaacaaaaaatggatggcgattcttttaggaggaatcatggctgcatctctggcagctccgtgctcagtaagtgcagctgagaaaacaacacttacattctggcatgcaatgggcggcacaaacggtgaggtgcttcagcagatcgtggatgatttcaacgcatcccaggatgagattgagattaaagctgagtatcagggaacctatgatgataccatcacaaaactgaaagctgctatgcagagtgactccggtcttccggatgtctgccagatgtatgacgtaggaacaaagttcatgtatgacagtggtgctgtcattcctgtagaagacaaatttgagagcacaggctatgataagagctctgttatggaggttatcagcagctactataccgtagacggcaagcagtatgcaatgccatttaacgtatccacacctatgctgtattacaacaaagacgtatttgaggcagcaggacttgatcctgaaactccgccaacaacttatgatgaggttcttgaggatgccaagaagatcgtagagagcggagcagctccggttggttattcacaggctatttacggatggttctttgagcagcagcttgcaggacttggtgtaacatacggaaacaatgacaatggacgtaaagaggcagttacagctgttgattttgattccaacggcggcggcctgaaagtatttgatatgtggaaaaagctgtatgattccggatatttcgaagattacggaacaacaacagcagatactcagacagcattcttctccggacaggttggtatgatcatcgagtctactgctatcctgaaaaatgcagttgattcttctccgttcgaagttggtacaggatatcttccgagaatcgagcagaatgatgaaggcggtgttatcatcggtggtggatccctgtggcttacagatacaggcaacgaagctaacgaagatgcagcatggaaattcatcgagtacatcacaactcctgatgtacaggctaaatggtccatgggtacaggatactttgcgatcaacgagaaagcttatgagacagaggatatgaaggcttacctcaaagaaaacccgaacttcgagacagctatcaaccagctgaaggattctcctgtaaactgcaatacagcaggtgttctctcaggtgtacagacagaagcccgtcttacattcaacgagatcatgccgcaggtatatgatggcaagcttacaactcaggacgctgttgatcagcttgcagcttctgtaaacaaagcgatcgagaactataacgagtctattaaataatcagaatgccctctgatcagtagatagagcaacagatagggataccgccgccgggcgccggtatccctgctgttttacatgctgtgagactacagatcatgtatatccggggtataggatcatatgaaaaactgcgtagtgagacggacagagagagtccggctgactagacagctttcgaatggagggagtgtggcctgcagcgttcgtgcagggcaaaatgaagtgatgcgcgattggcgttatcaccggcggaaaataataatacaacaggaaaggagcaaatttatgggcggaattctcggagcatgtaatgcaatatcggattatttgcacactttaaatatgggatcgacgctgtttcggctgattcttgcgatgtttcttggatgtctgatcggtattgatcgtggaatgaagaagcgtgtggcaggtgtaaaaacacatatgatcgtctgtatgggggcaactttggttatgatgacgggcgattttatccatgtatattctaatggggcaggaatcggagatactgcacgacttggcgcacaggttgtcagcgggattggttttcttggagtgggaactatcattgtgaccggacagagacatgtatccggtcttacgacagcagccagtctttggacttctgcgtgtatcggacttgctgtgggaatcggcttttacagcggtgcgatctttaccacgctggggcttattctggtgttcaaatatgcgaaatatatagaggtttatgtggaagagcattccaatacctatgacgtatatatggagtttgaaaatgaagacaagatgagtatggtcataaagaagctccgggaagaggacatcatgatctccaacgtagttatcatcaaaaagagatccaaaacacagagtgtggtgatccaggcaacaatggaggctgccaaatggaaagcacgccatactgtatttcgtgaggtaagacagcaggaaggagttatttctgtggaggaaatatgatcgggaatcgggaatacaatgaaacttatcatgtttttgagaaagttaagagcatgttaaagaaaaaacgatgtattttacgaaaaatgcacttgaaatatgaagaatagtctgatacaatgaatacaaagtgaagaaggaatctgattcagcttgctgaatacagagaatgccattgagaacagagaccggcatgaagacacatggataagtgtgtttttatgccggctatttttatgcgcaaatgttaatgtttcaaaaggattacaagggttacaaagggttacggcataaaaataatggcatattcacttgaaagattgctgttcgtaagcagtactcctcgcagaatatatacctgcggacggcaatgcttgtgttgcaacggatattctgctgtttccggcgcagagaaagccggggacagttcagaagatccgcaaacaggaaaggagaaacagatctatgtatgatgtgatcattatcggagcaggagtttccggagcggcagcggcgagagagctttcaagatatcggctgaaaatctgcgttctggagcgagaagaggatgtatgctgtggaacttccaaggcaaacagcggaatcgctcattccggttatgatgcagaaccgggaagccttatggcggaactgaatgtgaagggcagcaatatgatgggacagctttcgaaggaactggattttccttttaaacagacgggttcattgactgtctgtacgactgagaatggaatcgccatgctgcataagctgcgtgaaagaggaatgaaaaacggagtagagggactaaggatccttgacagagaagaagcacttgccatggagccgaatctgtctgatcaggtgctggcagcgctgtatgcaccgacagccggaattgtctgtccctttgagctgaacattgcaatggcagagaatgcatataacaatggtgtggaatttaaatttgacacagaagtaaagaacatccgaaaacaggaaaaaggttttgttgtggaaacctcaaagggtgattttgagacaggctgtatcgtcaatgctgccggtgtctatgcggatgtttttcataatatggtaagtgagaaaaaactgcatatcactcctcgtaagggtgagtatatgcttcttgataaaagtgcaggaacacatgtgaatcatacgatctttgcacttccaaataagaacggaaaaggagttctggtaacacagactgttcacggtaatcttctgatcgggcctacagctacggatctggaggatcgggaggaaacagcgactacctcagaggggatggaggaagtaagtgtcaaatcccggaaaacagtaaaggatattccactgcggaaggtgatcacaagctttgcagggcttcgagctatcgaggacggtatggattttgtgatcgaagaggtggaggatgctccaggatttatcgattgtgcaggaatcgcatctccgggacttaccagctcaccggccattggctgtatggttgctgacatcgtaaaagaaaaattacatccggaagtaaatccggattttgatccggtgagaaaagggatcctggatccgtcagagctttctctggaagaaagaaatgagctgatcaaaagatcaccggaatatggaaatatcatctgcagatgtgagatgatctctgagggagagatcctggatgcgatccgaagaccgcttggagcgaaatccctggacggagtaaaacgccgtacaagagcaggaatgggaagatgtcagtcaggcttctgctctcccagaacaatggaaatcctcagccgagagcttggcatttccatggaggagatcacaaaaacaggcggagcttccagactgatcgaaggaatcaacaagaaaattgcagaggagggcgagaaccatgaatgataagattatgatgaagagagatatcgtgatcataggcggaggccctgcaggactggcagcagccctggctgcaaagaaagagggagcagagagtatcctgatcctggagcgtgataaggagctgggcgggatcctgaatcagtgtatccataatggatttggccttcatacatttcaggaggagctgacaggaccggaatatgcggcacgttttatccggatggtaaaagagcagcaaatcgagtaccggctgaacaccatggtcatggatatcagccaggataaggtgatcactgccatgagccgccaggagggaatgtatcagatccgggcaaaagctgtgatccttgccatgggctgcagagagagaccgcgaggtgcactgaacattccgggatatcgaccggcaggcatttattcagcaggaacagcacagcgccttgtaaacatggaaggatttatgccgggaaaaaaagtagtgatcctgggatccggtgatatcggactgatcatggctagacgtatgacgctggaaggtgcagaggttaaggcagtggcagaattgatgccatattccggaggcctgaagcgaaatatcgtgcagtgcctggatgactttggaatcccgttgaagcttagccatacagtggttgacataaaaggaaaagaacgtgtggaaggaatcactcttgcagaggtagacgaaaacagacgcccgattcccggtacagaggaattttttgaatgcgatacgcttcttctttctgttggtctgatcccggagaatgagctttccggacaggcaggtgtgaagctgagtaatgtgacttccggaccggtggtaaacgaaagtctggagacaaatgtagaaggtatttttgcctgcggaaatgttcttcatgttcatgatctggtggattttgtttcggaggaagccggcaatgcaggaagaaatgcggctctctatataaacaacaatggagaggacaaaataccggaagagataaaaatcacgctttcgccccaaaacggagtccgctatacagtgccgtctgagatccgtatcggtcatatggcggaggagcagctggtccgcttccgtgtgggaaatgtatataaaaattgttacatccgtgcatatctggatggagaacggatcttttccagaaaaaaacaggtggcagcacccggagagatggaacagatcaaattgaaaaaagagcagcttctttccattctggaaggaaaacagaaacaggataaacatgaacttgtgatccaggtggaggagtgatgaaaatggaaaaaagaaatcttacttgtatcggatgtcctatgggatgcgcccttctggtggaaatggatggaaaagagatcatttccgtcataggaaatacctgtaaaaaaggtgcggaatatgcagtgaaggaagtgacagatccgaccaggatcgtgacaacgaccgtgcgtgtgaagaatggaagcatgccggtggtgtcagtaaagacagcacaggatattccgaaaggaaagatttttgactgtgtggaaacgctgcgggatgtatgtgtggaagcgccggttcagatcggggacgtgatcctggagaatgtagcaggcacaggcgtggatatcgtggctacaggaaatgtgaagcagatcatacagtgatctgcaaaggatatatggcaatctgtatgcttataatatgtcagccctccggcagacaaagcgaataaaataaacctgaaaaggcttttttatcgctttgtttgctatgaaataaaatatacaaaatgcacaaaaaatattagcgcctaaaagaataattaattaaaaaataacaaaaaaattaacaaaagtcgataaaaaatgttgaaaataaataaacgctatgatataatcagaaatatgaattagcaaaaatgctcacaacgatgtaatgcattgaatggaggatgattagaatgaaagtatttggacatcgtggtttcagcggagaatatccggagaatacaatgctggcgtttcagaaggcagtggaggctggttgcgaggggatcgagcttgatgtacagctgaccaaggatctggttccggtgatcatgcacgatgagaaggttgaccgtaccacagatggaaacgggtatatctatgatcttacatatgctgagctgtgtaaactggattgcagttatccggataagtttgccggaaaattcggcaggcttcagattccgactctgagagagtatttggagtggatggcagaggaggaagatctgatcaccaacatcgagctgaagaacagtgtttattattatggtggtatggaagagaaggtcattgatatgatctgcgaatatggtctggaggatcgaatcatcctttcctctttcaataacgcatccattgtactgtgcagacagagtgatgagactattgcaggaggctttctggtagagaaatatgtggataatgcaggggtttatgcaagaacctgtgatgtgcagtattatcatccgaatctggaatacctgaaggaagagcatgtacgcagctgttcccagaacgggatcggggtgaatgtctggactgtaaacgaggaagaggatatgagaaggatgaagaaatggggagtaaactccatcatcaccaattatccggacagaggaagagcagtggcagatgaggattgacactgtaatgcaaagacgctttctgtaaggtacatacaggaggcaggctaaatttgaaatctccggcaggagggggtcctgctgcagatctatataagcaaaataaaaaaactataataatgtatatggaggatttttacaatggagaaagaaacaagaccttttatttcctggcagcttgcagatgattttatgactgcagtatttgagaaaatgggagttccgacggaggatgcaagactttgcgctgatgtacttctggaaagtgacagacgtggaatcgagagccatggctgcaaccgctttaaaccgatctatatcgaccgtatcaaatccggaatcttaaatcctgtaacaaagatcgatattcttaaagagacaccgacaactgcagttcttgatgctaacgatggtatgggaatggtagccagcaagaaggctatggacatgtgtatcgaaaaagcacataaatacggcatgggtatggttgcagtccgtaactcttcccattatggaatcgcaggatattggacaggtctcgcagcaaaagagaatatgatcggtatcagcggtaccaacgcaagaccatccgttgcaccgacatttggtgttgagaatatgcttggaaccaacccactgacatttagtatgcctacagatgagccgttcccgtttacactggactgtgcaacatctgttatccagaatggaaagatcgaatactacgcacgtatcaaccatgatactcctaagggtcttgttatttccagagaaggagaggagcttacagatagtgcagagatccttaagaagatcagaagacagcaggcagcacttgctcctctcggtggatttggtgagacaaccggaggatataagggatacggatactctactgttgttgagatcctttccgctgctcttcagtccggtctcttcctgaaagctctggatggtaaggatgaggaaggaaagatccgtccatatcatcttggacatttctttattgctatcgacacagaggcatttatgggtgcagaggcattcaagaaaacatgcggtgatatcctgagagacctgagaggttccgagaaggcccctggacaggaacgtatctacacagcaggcgagaaggaatatgatgtatggatgtatcgtaaggataagggagttccggtgacagaggcggttcagaaagagtttatcggacttcgcgatgaattcggacttacacagttcaaattcccgtttgagaaataatgtatctgcagaagggaagtccatagaggcttcccttcttttgccagagaagaagattgtctgagaattgtaatacagccggaaataaaacagatatatttggcaaatgtgtctggtctttgaagcaataaactgatacaataagaataatatcttcaaacaatgcgcggagataggatgatattgtgtgaacattgcggaggaagagagaagatgaacaaagaatttctggacgcgatcgaggcgaacccgatcatagcggctgtaaaggatgagcaggggcttcagaactgtttgggcagggaggagcttaccgtgatctttatcctgtatggagatatccgttctattgggggaattgtggagcggatccaccaggcggggaagatcgcgatggcacatatagacctgatcacaggtttaagctcaaaagaggtttctgtggattatatttgtaaaaatatccatgcagatggaatcatttcaacaaaagcatccatgatcaacagggcgaagaagcttggaatgtatacagttctgcgttttttccttattgattccatggcgatcaagaatattgagaatctgggaaatcagcatgagcagctgccggatgtggtagaggttctgccggggctgatgccgaagattcttaaacagatatgtaaaacaagcaaggtgcctgtgatcgcaggcggtttgatctccgataaggaggatgtgatgggagccctgggtgcgggggcagcagcggtttccactacaaatcagaaggtatggaaattatgaggctgcagaggcattgagccgcagccaagaaatgtattggaggatttttatatggcaaaatatgttatggcgctggattccggaacgaccagtaaccgctgtattctttttgatgaaagcggaaggatccgcagtgtggcacagaaggagtttatccagcattttccgaaaccgggatgggtagagcatgatgcaggtgagatctggtccacgcagctttctgttgccagagaggctatgaaccagattggggcaacggcagaggatattgcagcgatcggtatcaccaatcagagagagaccactattgtctgggataagaatacgggacagccggtttatcatgccatcgtatggcagtgcaggagaacctcagaatactgcgacagcctgaaagcaaagggactggaagaaaaattccgtcagaaaacaggacttgttatcgatgcgtatttttctgccaccaaggtaaaatggatcctggataatgtggagggtgcccgcgaaagagcagagaagggtgagcttctgtttggtaccgtggagacctggctgatctggaagctgaccaagggagctgttcatgtaacagattattccaatgcgtccagaaccatgatgttcaatatcaatacactggagtgggatgatgagatcctggaggagcttgatattccgaaatgcatgctcccgcaggtaaaagagtccagtgagatttatggtgagacagatccgtcctttttcggtggaaggatcccggtagccggtgctgccggggaccagcaggcggcgctgttcggacaggcatgctttgagaaaggtgaaaccaagaatacatatggaaccggtggctttcttctgatgaatgcaggagataaaccggtgttttccaataacgggctggttacgaccatcggatggggacttaacggagaaatcacttatgttctggagggatccgtatttgtggctggtgctgcgatccagtggcttcgtgatgagcttcatctggtggattccgcatcggataccgagtattttgcgggaaaggtaccggatgcaaacggctgctacgttgtgcctgcatttacaggacttggagctccctactgggatcagtatgcccgtggcacgatcgtgggattgacccgtggtgtaaataagtatcatattgtgcgtgcgactttggaatcacttgcatatcaggtcaatgatgtgctggaggttatgaaggaagatgcaggaagtgaccttgcagttcttcgtgtagacggcggagcaagtgcaaacaaccttctcctgcagatccaggccaatatcagtaatgtggctgtagaacgtccggaatgtattgagacaactgctcttggtgccgcatatctggcaggtcttgctgtgggattctgggaaagcaaggaggcagtactggaaagtcgtgatgtggaacgtattttccgcacggagatcgatgacgagaagcgaaatgccatggtaaaaggctggagagctgcagtaggctgctccagagactggatcaaaaagatccagtaaaagataaaaaagaaaagtcatgcagcgggaccggatgaaaatgtcctgtgcatggcttttttgcgtttccggaatgtcacagacagaccggcatataaagcgatcgcggaacagatccgccggagcttacagagtggtcagatcgatcctgtaatcgtcggaaccctctccgtcagcagtgtagtaagctgctctttcttctgcatttacatagatgtggagctctttgcctttcaggccctttgcttctgcatctttcttaacagctgcctcaaggtcggcaactgtgatggatgtctcaaaaatttcaagtgtgatgccgctgatcttatgattttttacagtgttcttaacttcttctactacttctggtgccttggctgctacagtctctgttgcctttttgactgctttaacggttttttcagctgcaggtgttttttcaatcttttctacagttgatttcacggtagctttggccttggtggttgcgctcttcaggttgcttgttctgctgtttcttcttttttccataatggaacactcccttccacatatttcgctgacagaacggatctgccggaatatgtacctgtttacagtagcatgaatccggtggaaagtcaaatttttgcttgggtgttgcatttccggcagttgtcgtataaactggattacagagaaaatcagacaggggtacagagattgaagaatattcaggaagatattaaaacaggaaaatttaagcaggcatatctcctttacggtgaggaagcctatctgaaacagcaatataaaagaaatctggtgaaggctctgaacccggacgatgataccatgaattttaccagatatgaggggaaggggatcgatgtccgggagcttttgagtctttgtgataccatgcctttttttgcagagcgaagagtagtccttcttgaggatacgggattctttaagaacaaatgcgaggaactggcagattatatgaaagctctgcctgattatctgtatctggtgttctgcgagtctgaagtagataaaagaagccgtatgtacaaggcggtaaaagcctgcggcagcatcggggaatttaaacagcaggatgaaaagactcttatgcggtgggcagcagggatccttggaaaaaatggccgcaggatcacccagagagatgtggagcttctgctgaccatgacgggaacagatatgggtaatataaggatggagctggaaaagctgatctcctatacggtcggaagagatgttgtgacggctgcagatatccaggctgtctgtaccacgcagacaaccaataagatctttgatatggtgcgtgcggtgacggagaagaaccagaagcgggccctggatctgtactatgaccttctgactcttcgggaaccgccgatgcggatattgtttcttctggcgaaacagtttcgtcagatctgcctgaccaagaaaatgtcacaggagggtctttctcagaccgagatcgcttccaaactgggagtaccctcttttgttgtgcggaatctggcatcctgtgccagatcctacactgtggaagagctggagaatgctgtgcgggattttgtggatgcggaagaggcggtaaagacaggtacacttggagatgtgctcagcgtggagcttctgatcgtgaagtatagctcggcgagagcagtgagagcctgagttttacggagacgggttctgccacagggtcgctccgttgtccctgagccatttttcgcaggctttatactccggcatcacagatgccaccactgcataaaaggcaggggaatgattcatttcttttctgtgggaaagttcgtgtactacaacataatccaggactttttccggggcgaagatcagccgccagttgaagttcaggtttccttcgctggtgcagcttccccagcgggttttttgttcccggatcgtgatacggccgtaggttacgcccatttttctggcgtaggctgcggtttttcttttgaatatttttctggcggattccatataataactgcgacggaattccgaaagaggcgggttttcagcctggggctgtgccggcctggaggcggcgtgggagaggtgcttcaggatccagctttctttctgtgagagaaaacgatggatggtggaatctggcattgtgtgtggagcacggacagttacctgaccggaaacgctgacctggatcgccagggttttccggctactgcggataatgcggtagggaaagggatgagatatcataaaaaaactccttttggtcaatacagaaatctatatacaaaacagaaatctatatacaaaaaagacagtcgctgacggttcgactgtctttccttttacttataagcttataactaaaatattccgtggtctattacgcaatgctgttgacagctttggaaagacgggaaatctttctggcgcagttatttttgtgataaacgcccttggatgtagctttgctgattgtggagattgcgtccttaagagcaacctctgcagctgccttatccttattctcaactgctgtctcaactttcttgatggaagtcttaactgcagaacggattgctttgtttcttgcagccttagtgctgttaactaagattctcttctttgcggatttaatgttagccaattcgtacacctccgattccttaaaaatataatattaaattacattcacaggaacagacacgggcgctcctatgaaacatgcttatatatattattatacgtgcacaggaatgtcaagatgtttttcgcaaaaattccaaaaaaatatgcaaaaaataccagatgctgtgtggaaaaggggaaatgatacatatttatgggaaaaaggggaaataataaaagggaaaacaccggaaaagctgcaggcagcagcgaaaaagtctttgcaatcttacagaaaaagaggatgagagtatggctggaaggagcagaatcagaacagacctggcgctggaagcaacggaacgctttcaggcggaaaacgtagaagtacgtggagtagagatcagggaaagatacgatgaggaaaaggatgttcggactaccgtagtgcggatcacaacggaaaatggagccaggaccatgggaaaaccacaggggacctatattaccattgaggcaccggatctttccgttccggatgaggattatcacagggagatctcggaagaggtggcacatcatttgagggagctgatcgatctcggacggcagcagtcgatcctggtggtaggccttggaaatcaggagattactgcggattcccttggccctcgtgcagtttccaatcttcatatgacaaggcatgtgatccgggaatatgggctgaagagcaatgaacatatgaaaatgcatcagatcagcgggatcgttccgggtgtgatggcacagaccggaatggaaactctggaaattgttcggggtgttgtttctgagacaaagccggatttggtgatcgccgtagatgcgctggcggccagaagtacgacaagacttaaccggacgatccagatcacggataccgggattagtccgggctccggcgtggggaatcacagggaaggcctgaatgaagaaaatctttcggtccgtgtgatcgggatcggtgttccgactgtggtggatgcggctactattgtccatgattccatggcagagcttctggaggcactggaggaggatgagcagaaggagtttctggaagaaatgatctcaccgaagctttacaccatgtttgtaacaccaaaggatgtggatgaaacggtacgatatttaagctttaccatttccgagggactgaatctggctttttccgatagtctaatcgaagaggacaggtcataaaataccataagaggtgatcgttggtgacgaatatccagagggctttctgcgtggttttgagcctgatcttcctgggtgtggtggctgtccttccgggagattttttcaggcatggtgagatctacagacagctgccgctgtattgctttctggaaaagaaagctctgcagaaggaaaatggcagagaccgggaaacagagatgcttttgcagaaaaaaaacgcagagcatctgggtgaagaagtggaagcagagaaccgaaaagagcaggagacgctgctgatggccgaggcggaagaagtggaaaagaaagaagcccttcagaagaaagaagagcttcaaaagaaaaaagaaattcaaaagaaagaagcggaagaggcagaaatggcagggaaaaaatcctctgccggcaaaaaaaatgaaaaggagactgttaagggaaatacagaacaggaagttgctgagccagaaattacagagccgggaggttcagaacaggaagctacggagccgggggacacagaaccggagactcctccgtcagaggagaaccgatccggtgaaaatactgcgaaggaacaggagactgtggcactgccacatccgcagattgacttgtctcaggcgaaactggcagattttgactatgtgatgaatcagttttttatattggattccaatacggaaacgaatgcgcagcagatcagtgcgccccgttttctgaaggaggatctgtccgttaaaaaggattcatcggtaccccagatcctgatctatcatacccattcccaggaggcttttgcagattcaagagaaggacagactgaggacaccatcgtaggagtgggagatcatcttactgaacttctggaaaaaacatatggataccaggtcattcatataacagatgcctttgatatgatgggaggaacactggacaggagcaaggcttatgattatgccagggcatccatagaaaaagtgctggaagaaaatcccaccattgaagttgtgatcgatcttcacagagatggtgtgccggatgagcgtcatctggtaacgcaggtgaatggaaaacctactgctcagctgcttttttataatggattaagctatacagtcagtcagggggcagtgagttatctgcccaatccttacatagaagagaatctggcattttcctttcagctggaatatcaggcggcacagtattaccccgatctttaccgggggatctatctggcaggtcttcgctataatctgcatcttaagccacgggccctgcttctggaggccggagcacagacaaataccgtagaggaagtccgaaatgccatggaaccatttgcagatatcttaaacagagttctgaaaggcagtgacaaagaaggctgaaatatgatatgataaagagcagtatggaaaaatatgcgttctgaacgctttatacgagagaaatttaaggaggacttcctgaatgatagaccagagtaaaattcggaatttttgtatcattgcacatatcgaccatggcaagtcaacacttgcggaccgtatcatcgagatgacgggacttcttaccgagagggaaatgcaggcccaggttctggataacatggaccttgagagagaacgagggatcaccatcaaatcccaggcggttcgtattgtatacaaagccaaggacggaaatgagtatatttttaacctgatcgataccccgggacatgtggattttaactatgaagtttcccgaagccttgctgcctgtgacggagcgatccttgttgtggatgcagcacagggaatcgaagctcagacacttgccaatgtatatatggcactggaccatgatctggatgtggttccggtgatcaacaagatcgaccttccaagtgcggatccggagcgtgttatcaatgagatcgaggatgtgatcggaattgaagcgcaggatgcaccgcagatttccgcaaaaacaggactgaatgtagaccaggtcctggagcagatcgtcaataaggtcccggcgccggcgggggatgtggatgcacctctgaaggctctgatcttcgactctgtttatgacccttataagggtgttatcgtattttgcagagtgaaggacggacgtgtgaaaaagggcacgaggatccatatgatggcgaccggattcaccacggaggttgtggaggttggatattttggagcgggtcagtttatcccgtgtgacgagctgacagcaggtatggtcggatatatcacagccagcatcaagaatgtccgtgatacccgcgtgggtgatacggtaacggatgcggacaacccctgtgcagaggcacttccgggatataagaaggtaaaccctatggtttattgtggcctttatccggcagatggtgccaagtacggcgatctccgtgacgcgctggagaagcttcagctcaacgatgcttccctttattatgaaccggagacatcggtcgcccttggatttggtttccgctgcggcttcctgggacttcttcatctggagatcatccaggagcgtctggagagagagtataacctggatcttgtaactacagcaccgagtgttatctataaggtctataaaaccaatggtgagatcatcgagctgaccaatcccaccaaccttccggatccttcagagatcgaatacatggaagagcctatggtgaaggcggagatcatggtaaccacagagttcattggtgcgatcatggatctctgccaggagagacgtggtcagtatgaaggcatggaatatatggaagaaacccgtgcactcctgaaatacagactgccgctgaacgagatcatttatgatttctttgatgcactgaaatcacgttccagaggttatgcatccctggattacgaactggacggatatgagagaagtgagcttgtgaagctggatatccttgtgaataaagaagaagtggatgctctttcctttatcgtgcatgcagatactgcttacgagcgtggaagaaagatgtgtgagaagctgaaagacgagatcccgagacagctctttgagatcccgatccaggcagctatcggaagcaaggtcattgccagagagacggtaagagccatgcgtaaagacgtacttgccaagtgttacggtggagatatttcccgtaagaagaagcttctggaaaaacagaaggaaggtaagaaacgtatgcgtcaggtaggtaacgtggagatcccgcagaaggcatttatgagtgtcctgaagctggatgataaataggagatgactttttgaaaaaaaatataaaaaaactgtttctggcagcaggacttctggctataacaggagctctgcttaccggatgtggttcaaagaagaaaaatgcagaagaggaaagtgtgatcaaaatcagtacagcgccggaaccaactgccactcctgatccgaaaaccgtagatccggatgcagtgacgagcaatggaaatctgacaatggtcaatgagtacctggcagaaaacggcagtgaggcattggggatcgatggcgtgacaccgacaccggctgcttcagacggaagcacggataatgcggatagtgccggtgaagatacaagctccgatgaggataatgatacatcaggtagtggtggagaggaaggagccatggatggagaatgaggcgaaaaaaccgctggagctctatatccatgttccgttttgtgtgaaaaaatgtgattactgtgatttcctttccggacctgccggaaaagagaggcagcgtgaatatttccaggctctggaaagggagatcgccgctgttccggatttttcggaaagggagatcaccacagtttttatcggcggaggaacaccttccgtgccggatccgtctcttgttggagagatgctggatcagatcagaaataagttttttgtggccccggatgctgagatcaccatcgaagcaaatccggggactttatataaagaaaaacttcaaatatatctggaacacgggatcaaccgactgagtctgggacttcagtccccgcagaatcgggaattaaagatccttggaaggatccatacgtgggaagagtttcaggagagcttttttatggcaagggatgcaggcttttccaacatcaatatcgatctgatgagtgccattccggaacagacctatgcagactgggaaaaaaatctccgcacggtggcagggctttcgccggaacatatttccgcctacagtctgatcattgaggaaggcactcctttcggggagagaaagctgaaattgccggatgaggatacggagtaccgtatgtatgagaatacggcagggatcctggaggaatatgggtttcatcagtacgagatctccaattatgcgaaaggcggacgggaatgccgtcataataagggatactggcagaggatcgattatctgggactgggacttggggcgtcttcacttctggatcatatgcgtttttccaatactgcggatatgaaggaatatattggaaacagtgcgtttccggataagatccgccagaatatggaaagccttacagaggcagatgagatggctgagtttatgtttctggggcttcggatgacagagggcgtttcaatggaagcgtttgcggaatatttcggaaaaaatatggaaaacgtttacggagaggtcctgaaaaaacatctggagatcggaatgctggaacaaaaaggagacaggatatatctttcgagaaagggaatccatgtgagcaatggagtgatggcggattttctgctgtagaaaaatttgtcgattttttcaccttgacgaacggatgttctggcagtatactgataaaaaatcagaagttttacagcggaataaaagaggtagattctgctgttgagaagaataccggagtattttttatgaccggacagagtaggaggctttcatgtcagcagaagcaaacgataagaagcgttttatcaggatacgcggagccaatgagaataatcttaagaatcttagcgtcgatattcccagagaccagtttgtggtacttaccggactcagtggctccggtaagtcatctcttgcatttgataccatttatgcagagggacagagacgttatatggagtcactttcttcctatgcgaggcagttcctgggacagatggagaaaccggatgtggagagtatcgagggccttccgccggcaatttccattgatcagaagtcaacgaaccggaatccccgttctacagtgggtacggtaacggagatctacgattatttccgacttctgtatgcccgtgtgggaatcccgcactgtcccaaatgtggaagggaaattcgcaaacagacggtagatcagatggtggatcagatcatgacgcttccggaacgccagaagatccagcttcttgcaccggtagtgcggggccgcaagggaacccatgttaaacttctggatcaggccagaagaagtggatatgtgagagtgcagatcgacggaaatctctatgagctttctgaggagatcaagctggataagaatatcaaacataacattgagatcgttgtggatcgacttattgtgaaaccgggaatagagaagcgtctttccgattccattgaaaccgtgctggatctggcggatggtctgctggtagtagacactatggacgggaagcttctgaatttcagtcagagtttttcctgtccggattgcggcatcagcattgatgagatcgaacccaggagcttttcctttaataatccatttggtgcctgcccgcagtgtctgggtcttggatataagatggaatttgatatcgatctgatgatcccggataagaaacggagtatcaatgaaggggctatcgctgttctcggatggcagtcctgtaccacgcagggaagcttttccagagcaatcctggatgccctggcaagggaatatgcattttctctggatacacctttctgcgagtatccgaagaaggtccaggatatcctcatccatggtaccggcggtcattctgtgaaggtttattataaaggacagcggggagagggcgtttacgatgtggcgttcccgggactgatccgcaatgtggagcagagataccgtgaaaccggttccgaggccatgaagcaggaatacgagagctttatgcggattactccgtgcaccacatgtaagggacagaggctgaagaaggagtcactggcagtgaccgtggcggataagaatatttatgaagtgaccaatatgccggtacagaagctgcagggctttctccgtgatctgaagctttcaaagcagcaggagcttattggaaggcagatcctgaaggaaatccgcgccagggttggatttctggcagaggttggcctggagtatctttcacttggaagagctaccggaaccctttccggcggagaggctcagaggatccgtcttgccacacagatcggatccgggcttgtgggggttgcatatatcctggatgagccgagtatcgggcttcaccagagagataatgacaagcttctgggggcactgatgcgtctccgtgatcttggcaacagtctgatcgtggtggagcatgatgaagataccatgcgtgcggcagactgtgtcatcgatatcggccccggagccggagaacatggcggacaactggtcgcaatggggacagctgaggatctgatgaaaaatgaggagtctgtgacaggagcttatttaagtggaagactgaagatcccggtaccggaagtgaggaaggaaccaaccggatttcttcatataaagggtgcggcagagaacaacctgaagcatatcgacgtagatattcctctgggagtgatgacctgtatcacaggtgtttccggctccggtaagagttctctgatcaatgaaatcttgtacaagagactttccagagacctgaaccgtgccagagtgatccccgggaaacatgatgacatcctgggtatcgatcagctggataaggtgatcaatatcgaccagtccccgatcggaagaactcctcgttccaatcctgccacatataccggagtttttgaccagatccgtgatctttttgcagccaccgcagatgccaaggcaaagggctacaagaaaggccgtttcagttttaatgtcaagggcggacggtgcgaggcctgcagcggtgacggaatcatcaagatcgagatgcattttcttccggatgtatatgtgccttgcgaagtctgcaagggcaaacgctacaatcgtgagactttggaagtgaagtataagggcaagagcatttatgatgtattgaatatgactgtggaagaagcactgacattttttgagaatgtaccgtcgatccggagaaagatcgagaccttgtatgatgtagggctttcctatatccgtctgggtcagccctccaccactctttccggaggagaagcacagcgtatcaagcttgccacagaactcagcaagcgcagtaccggaaagacgatctatatcctggatgagcctaccacaggactgcactttgcggatgtccacaagctgatcgagatcctgcgccgtctgtctgaaggaggaaacaccgttgtggtcattgagcacaatctggatgtgatcaagacggcggatcatattattgatatcggaccggaaggcggtgacagaggcggaacggtaattgccagaggaactccggaggaagtagcagagaatccggtttcctacaccggtaaatatgtgaaaaaatatttggaacagaaataaccggtaaaagttcttttcaatttctgtggttttgtatataatgaagtgcgggaacgtttcggcacagaccggaacagaataagtcagaaatgcgtcagcatatgaatgtgtatgacgcaggcgggaggatttatgccggcaaaggatattggaatcgatctgggaaccagaaacagtctggtattttccacaggcaagggaatcgttttaagagagccctctgtggttgtttatgataaagatacagagaagatcagagcaattggtgaggaagccagacagatggcaagccatctgacttccaatatggaagtgatctggccaatccgaagaggtgtgatcgtagattataatgtaatggaaaagatgctgaaatattttatttcacaggctatgggacggagagcgttccggaaaccgagagtcagcatcagtgttccgagcgggatcacggagatcgagcgcaaggcagttgaggaagctgcttatcagtcaggggccagggaagtttttcttgtggatgagcccattgctgctgctatcggggcaggtgtagacattaccaagccatttggcaatctgatcgtggacatcggtgcagggaccacggatgttgcggtcgtatccgtaggaggtgtggttgtttccgcatctgtgaaggttgcaggagataattttgatcatgcgatcatgaattatgtacgtgagaagcacagcctctttatcggggaggatgcagcggagaatatcaagatcaagatcggaacagccagtgaagaagcggatcttcgcacgatggaggtcaagggcagaaatatcatcacaggacttccgaaggtggcaacactgacttctgaggagatccggaccgctttgcgggaaacgaccgggcagattgtggagactgtacatggtgttcttgaaaaaacaccgccggagctggcggcagatatcatggatcgaggaatcgttcttacaggcggaggtgccatgctgcatggaatggatgcattgatcgagcagaaaacaggagtcagcacactgactgtacaggatgcaatgcttgtagtggctgcaggaacaggaaaatatgcggaaatcatgtcaaggatgtaaaccgttatgaggcgtccggacggcacagggtcagagaagagactgccgcaggaaactcatacagataaggcgctgcagctgcagtgccttttgctgttatcagaggtttatagatggagaagaaaatgagtgagacagttacaggatatatagatcatgtgatcttccggaatgaagataatggatatacggtcatggtactgaaagggatggaagaggaacaggaactgacctgtgtgggaacatttcctgcgattacccagggggctgccattgaagcttccggaaattatacaacgcatccggtgtatggcaagcagtttcagatatcctcctacgtggaaaaaatgccggaggatgcattggccatggaacgctacctgggttccggcgcgatcaaggggatcggagcggcactggcagccaggatcgtacgtcgtttcggcgatgatactatgcgtattgtagaggaagagccggagcggctggctgagatcaagggaatcagtgaaaaaaaggccatggagatcgcagaacagatgacggagaaagcagatatgcgccgcgctatgatctttctccagaaatacgggatatcactgaatctcggcgcaaagatctatcagaaatatgggcagactgtatatggagtcctgcaggagaatccgtatcgccttgcagaggatatcagtggtgtgggattccgtatcgcagatgagatcgcttcccggatcgggatccatacagattcagattacaggataagaagcggaatgttgtatactctcctacaggcttcaggagaaggccatatctatctcccgaaggaggaacttttttccagggcatccggacttttgggagtagattcctcctacatggaaaaacatctcatggatatggtagtagaccggaaactgatcctgaaagaaacagaagacggtgcagttgtctatcccacacgatattattatcttgagctgaattcagccagaatgctctgtgagctgaacatcctctgcccggaagatgaggagatgatggagaaacggatcaacaggatcgaaaaggagacaggaacccggttagatgaaatgcagaaacaggcagtggcggcagctgccagtcatggtctgttcattctgaccggcgggccgggaaccggaaagactacaacgatcaatgcgattatccgttattttgaagaggaaggcgctgagctgcggcttgcagctcccaccggccgtgcagccaagcgaatgacagaggctaccggatacgaggctcagacgatccacagacttctggagctgaatggaatgccggaggaagagcaggaaggccgtgcagttcattttgacaggaattcggagaatccgctggaagcggatgtgatcatcattgatgagatgtccatggtagatatcgcactgatgcattcattgcttcttgcagtgactgcagggaccagactgatcctggtaggtgatgaaaatcagcttcccagtgtaggcccgggaaatgttctgagggatattatccgcagcggctgttttccggtagtagagttgaaaaagattttccgccaggcatccgaaagtgatattgtggtgaatgcccataagatcaaccggggcgagcaggtgaccatcaataacaagagccgggatttcttttttctgaaaagatatgatgcggatatcattatccgtgtggtgatcgcgctgatccaggagaagcttccgcgttatgtagatgcaaagccctatgagatccaggtgctcacgcctatgcgtaagggacttttaggtgtggagcggctgaaccagatccttcagagatatctgaacccgccggatgaaaagaaaaaggagaaagagatcggacagcgtcttttccgtgaaggggataaggtgatgcaggtgaagaacaattaccagctggagtgggaaatccttggacgatacaagattcctgtggataaaggtgtgggcgtgtttaacggagataccggtattatgacggagatcaatgaatttgcggaaacggctaccgtggaatttgaggatggcagacaggcagaatattccttcaaacagcttgaggaactggaacttgcctatgcagtgaccatacataagtcccagggctcagaatatccggcagtgatccttccgatcctttccggaccaaggatgctgatgaatcggaatcttctgtatacagcagtgaccagagccagaaaatgtgttaccgtagtaggcagcgagaccacttttgcggagatgatccgtaatgaaaaacagcagcagagatacagctctctggacagacggatccgggagctggatgaatctgaacagaaagagagcgccatcggggagaaaggactttcttgaaaaaaacagcagattttttactggacatgctttacccgaaaaaatgcccgctgtgtcatcagatactgaaagaaaaagaccggctgatctgcccggagtgttccggaaaggtcaggcctatatccggtcccaggtgtatgaaatgcggaagaccggtaaaaatggaagaggaatactgtgaagactgccgcaagggtgcccatcattttacggagggcagaagtattttctggtacggagaggtctggagacagtctctggtacgatttaagtattacggatgtcgggaatatggggatttttatgcaaaggcaatgagcgtcttcggaaaaaaatatctggaacggtggaagcctgatctgatcgttcccgttcctctgcatcccagaaaaaaaaggatgagaggttttaaccaggcagcatatctggcagaaaggctcagtgttcttacagggatcccatggaatgggcatctggtaaagaagatacgaagcacaagatctcagaaaaaacttaatgccatacagaggcgtcagaacctgaaaaatgcatatcaggtaaccgaaaggatcccgggtttttctgtacttgtggtggatgatgtatacacaacaggaagtacggcagatgccatggcaatgtgtcttcttgaggccggtgcagagaaagtttattttctgacaatatgcgcaggaagggcatgaaacagccgaaaaaacacttttcataggtatggaactatgctacaataaatttgattgcagttaaacagtataactgtatggaaagcgtaatgcggatcatatattggggattttcctgataaagaaagcttatgaggagttatttttatggtaaatgaagaaaaagtgaagatcatgaaccgtctggctatgtatgaacatggcgaaggcaggaagtatcttccggtgagcagatattatcgaagtgattatattggacttgcactgatcagaaacttttttctggtaacgatcggatatgtattgggacttgcaggcgttgccgcatatttcagcgaatatcttatggataatgtgaataagattaatctggtcaaggttggaatctatatcatcgtcggttatctgatcgtgcttgttgtatattcgatactgacctacatccagtattctgtgaaatatttccgggcaaaaaaaagtgtcagggaatattatcaggatcttacaagactggaaaaaatctacgggcgggaggaaaaaagaaatccggtccggagaaatgcaggaggacatagaaaatgacagctttacttgagatcaaacagaatatcaaaagattttacggacaatatgaagtatatatactgccggtcctgaagtttgttctggcatttgcctattttctctggatcaacagcaatatgggttacatgaaacagctggataatatttttgttgtcctgatcctggcgcttgtatgttcgatccttccggtttccgtgatgatgtttctgggatttgcgttgatgatcgggcactgttatgcagtcgggatcgaaacggcaggatttatgctgcttcttattctgttgatgctgatcctgttcctaagattcagcaggtcacagaatcttgcaatgatccttacaccactttccttcggatttggtgttcctgcacttatgccgatcggagcaggcctgctgggtagcgcattgtcagcgcttccggccggatgcggtgttgtgatctattattttatacggtttgtacatgcacagtcggcggcactcagtgatcctgctgcagagatcacagaaaaactgaagctgatctctgacggacttgtccacaactgggcaatgtggatcacggtgatcgcgtttgtggtagtgatcctgtttgtgaaccttctgagaacacgggcgtttgattatgcatggaggatcgctgtcattgccggtggcgtgatctatatcctggttatccttgccggagatttctgccttagtattacggtagccatggtgccgatgatcctgtccacagtgatctccgtactggcaggatttgttctggagttctttgtttttggcggagattacagcagaacagaacgtctggaatatgaggatgatgagtactattactacgtaaaagccgttccgaaggcatcagtcgccacttctgagagaagtatcaaaaaaatcaatgcggagccggtaaaagaagaaaaaaaagaagacaatgttgtgtctttcagtgatgatgtatttcctgagaagaacgaaatgcatacagtaaagatgccggatatggtttccgaaaatacagtaagtgagaaaccgcagggattggacaagatcgatttcgaaaaacagctggaggaatcgctgaaggatctttaaacaggaacgattggaatagctcaggaagaaaggaggagacttatgcagaatgtgctgacagttgtggtcggatatcttgggaaaatttcccttccgggacttggcgtgatagatatcattgagatcggactgatttccttttttgtatatcagtttatggcatggatcaaatttacacgtgcatatacccttctgaagggcattttgatcgtccttggatttatcctggtcgcatatatcttcaaaatgaatacgatcctctggatcttccggaacctggctaatgtgctggtgatcggtgtgatcgtaatctttcagccggagctgagaaaggcgctggagcagctgggacagaagaagtttgtttccaacattattccctttgattccggcagggaagtgcaggagcgtttcaatgacaagactatcaacgaactggtaaaggcctgttttgatatgggtgaagttaagaccggagcactgatcgtaatcgaggaagagatccggcttgatgaatatgtgagaaccggtatcaatattgacggtatccttaccagtcagctactgatcaatatttttgagcataatacacctcttcatgacggagcggtgatcgtgcgggggaaccgcgtagtagcagcaacctgctatctgcctctttcagataatatggaactgagtaaacagctgggaacaagacacagagcaggtgtgggtatcagcgaagctacggattctcttacgatcattgtttcggaagagacaggacaggtttctgtggccagaggcggtgagttatccagagggcttaacagtaagcagcttcgtgaagtacttgtttctgctcagaataaaaaggttgttgacaacggtaagctgagaaatctgctgaaagggagagtgaaacatgaagaaaaatctgactaagaacatccctttgaaaatcatgtcgatcattgtgggaatcctggtgtggctgatcgtagtaaatgttgatgaccctatcattacgaaaggctttgtgatctcagatgtgcagatcatcaatgaagcttatgtggatcagctgggcaagatggtcatgcaggatgatcgtgaaaattcagtacgtgtttatattacaggtgagcggaagatagtcaaccgtctcacctcaagtgatattaaggcagttgcagacctgcagcaggctcagtctaccgatacagaccctgtaatgatccccattacagcaacctgttccgggatacttccagagaatatccaggtgtcaccgcagaatctaagtgtccatctggaaaaaaaggtgaccaaggaatttgcgatcaacgttaccagtgatgacagcaagcctgcacaggggctggaggttgcttcgcttaccgcaaatccggaaaaagtccgtattacaggaccggaatccctagttggtaagatagacagtgtgagtgtggatgtaagttcaaagcttgagggaatcgaccaggatacgacgatcacaggcgcagaactgaccatcacagataagaatcaggatacactttcatcaaattccatgagctatctgaaatttgacaacaacggaaaggttaatgtcacggcaaagctctggaaggtgcgttctgatatacggatcagtgcgggatatacgggagaaccggcagaaggttatgttgtggacagtgtcacgacagtaccggagactttcagcgtagctggaagtgaagaagcactgaacaatctgaaacttcagggaaatactatttatcttgataatgagaatgtggatatttcaggaaagagcaatgacgtggaaaagaaagtaaacctgtcagaacttcttccggatggccttaagctgacatctggatccagtacggacctctggatcacagtcaatatcctgccggagggcagtaagatatacagcttcccgacagaggatatcaaagtaaagggtctgcctgatgatctgcagctggcgtttgaagttgcggatattgaactgaaggtgcaggcggaagatggagatctttcccaatttgatctgaagtcggtaggagcagcactttccatggatgactgggaggagggcagctacgaagtaccgatcaaaatcagccttccggaaggctacaagctgctggaggatgtaaccgccgagatcaaaatctccaaggtttccaatgtagacagcagcagtcagtaagtaatcacagctttggacaaggcttgaaggataagtaatataaagggagacagcagcaatgttaagttataaggtaacggtcaggaacccgtcagggcttcatcttcgtcccgcagggcttttgtgcggcgaggcaataaaatacaaatcgtccataacatttcagtatgccggaggtacagcgaatgccaaaagtgttctgagtgttctgggtgcctgtgttaaaagcggggatgagatcacactggtctgcgagggtgaggatgaacaggctgcgatagatgcgcttgtggctcttatcgaaggcggactgggcgaatgatacgtaacagatacaataattatttacagcagcatgatcaggagggattatcgtgaagagaagagttgtggcaatttttctcagtctgacattatgcatgggcggaactctggaagccggcgctgcggctttgggaagtacagacgtgcagatggcagcagagacagccggcgatccggctgaggatgtattcagtgatgaagagggaacgactgtacagcagccggagacagaagcgggtcagacaggtagtactgacagttcagaagaaataccggttgaaccggagaatccagcagagacaccggatgttatagaaacaccggaaactacagaaacaccggaggctacagaaacaccggaaactacagaagcaccggaggctacagaagcaccggatgcgacaacagaagacagtacagatccgggcgatgatttcagtgcaggtgatgcacaggagctggatgcaccgtcagcagataccgcagtacagaacaaagtagagaacaacaaggcagaggaaacttctgctaccggagcatcactggtaaacggtgtagtcgttgccaagacaagtgactgggtttctgcaaacggtttttacagactccgcaaaaagaaggttgctgcatctgcagccccggagggaaaagcttctgaggatccggcagaaagcagtgaagaagagcagaaaacaacagttgatgaaacagctgcagcagtacaggaagtacagcagactgaagagcttccggatggtgcagcagagagtgatcaggctcaggcgatccagaatgagtcagcagaaggagagcaggagactgcagctgaggaaggtacagcagaagaagcgcctacagaggaagtatccgcagcagaagcttctgcagagacagcacccgcagaaacagagacggcagccgaaacatcagagagcgtagataacgcagagactcttgccctggatgaagggaacgcttctcaggtatcagaaacaggttccatcgaagataattattttactgcgcaggatggtcttcttaagatcaataccaacggacatgtgggatattatctttttaatgaagacggatatctggtaaccggccgtatgacccgtgagccaggtgcagcaggttataccggaacacagaagacagaatggtatttcctcgaaaactccaaagcttccctgtattcggattccaccggaaaagcaatcacaccgtggacatccaatcttggccagcagaagagaaattactggttatggacaggaactgttttccgctattataattcccagggtgattacaaatccatagaggctcagaaccttgtaggcaagatcaagaagatcggaaatgcttattatacactgatgcgtaacggaaaaccgcgaacaggaatcctgaagctgacaaccggttccacaacatatcagtattacttccagccggcatcaaaggcaggagagattccaggaaagcttttttatggcggatggacatatgttttaaacagcaaaaatcaaaaacgttttatctattgtagtccgaaggctgccacacgtggacagatcatgaaacatggagtttatgtatcacctgtaatgtccaagaaatatcgatatatgctgaatgccagcggctatgttatgacgaatacaatggcgaaggcgcagaataacgcatattatgtttcagacagcaagggccgcatcattacaaaaaaacttgtgaagtataaaggcagcagatattatttcggaggcaatggccagagagtttcctggaagaactgctggcatggctgtccgggagcatccaacaagatttattatttcggaagcacagcaggaaaagttgttgaaaaatatggctggcagaaggtgaccgacgcaaaaggccagttcttcggatggttttactttgacaaaaacggaaaccactataagagccagatgataacaaacaagtcctccaaaaagagctattactttaatagcacaggacagcttgcaacaggaaaaacaaagatcggcaaaaaatactatttctttgcaacatcagatgccaatgcgcacagaggctggatgtacaagagtacattgatccgttaccagaataagtggtattatgcaggcggcaacggtgttctgaaaaagtcaggctggcagaaggtcggtaaatactggtactatctgcagaactataccgttgtgacaaataaatctatgaagcgtggttccgtaaatggttatctggacagccagggacgtttttccaccggctgggtgatcgtcagcgattactatgatcaggtcaaatatatcgatccggacagcggttccaagtatctgaccaatacaagcagatggatcgatggaaaactgtattactttgataaggatggttaccgccgcaatgatgtttccagtatttacggaggaccatattacctggaggttgataagaccaacggtgttatgactgtatacacaaatagtagcaagacgattcctgttaagacaatccgtgtttctgtaggtctcgccggaacacctacatgggatggtacatacagactgacccgcagtctgagatggcagccactgatgggaccgtcctggggacagtatggaacacatgttgacggatgcggacagggaggaatctttatccattccgtagccggatcgaccaggagtgtttataatcttccggcaggcgagtacctgaagcttggtcagcctgcatctcacggatgtatccgtacctgtgtggctgatgcgaagtgggtatttgagaactgtaacggttctacgatccacatttacagcagcggaaattacgttaacaatgaatccttcaagggaccgttaggccgcagaccgctggcaaccttccgtggagccggaaactttgatcctacagacccggaagttccgtgatctttaccgaacagtaccagaaagaaatatatagaataactgaagaccgatgttcagctgtatgaagctgacatcgatctttttccatatatggctttactttccattttttcatatgtataataaaagtcatgcacaaataaacaacataatttatggaaggaaactaaaatgaaaaactggaagaaatggctggtggcaggctgtatggcagcactgctgggaatcggaacaatgggaactacagcgatggccatgggcggcggaggcgtagaccgaagcgaggcagttgctgaggaagaaaaggtccccagcgggaaggcaacacagaattccagggtaagttcaaaggcttggaagaagatcaacggtgtctgctataacggaagcggccagaagctggaaggtgctgtcacacgtggaatcgatgtttctgagtggcaggataccatcaactggagccaggtcaaaaaatctaatgtagattttgcctttgtcaggatctcctatggtctgaatcatctggataagacatatgattacaacatgaaacaggcagagaaggcaggagttccgacaggaacctatgtgtacagccttgcgctgaacacacagcaggcactgaaggaagcgcagcttgctatccgtaaaatggatggatataaagtatcctatccggtggtttatgacattgaatatgatcagatgcgcaatctttccgcatcacagatcgcagatctggcaaagaccttctgcaatgaggtaaaaaaagccggatatcatccaatgatctactgcaatacagactggtatgacaacaagcttgactggagcaagatgacaggttatgatgtatggcttgcgcggtatggtgatacgatcccggctcctgacaagaaaaagtacaaatataccatctggcagtccaccgatggtgacggtggcggatatctgaataccaccaagggtctggttgcgggaatcccgtcttattctactgtagatattgacttcggttatgttgattataccaagatcatcacacccagatggcatgtacagaccggatacaaggcatccaccagaccggataccagcaactataaaggaaaaaccggctgggcaacagagaacggaaagaaattttattatgtcaatggtgtcaaaaaatacggctgggttcaggtgaaaaataagaaatattatatccataagaccgcaggaatgtgccgttcaaagctgatcagggattccaagaatatttccagatatgtagacaaaaatggagtccttgtgaaaaatacttggatcacctataaggagaaaaaatattattttgacaaaaacggacatgcgttaaagggcatgaaaaaggttggaaaggactattattattttcaggccaaatacggatacatgatgagacatgtgcggtacatgaacagcaggaatgatgtatattattttggcggtgacggcgttatggtcaaaaaggtattctatacatggagcggaaacaatgaaagccatacctattattttggctccaatggaaagatgcagagaggctggctcaaactggacggaaagagatattattttgatccggaaacaggaatcatgtacaaaaactgtactattgagaaaaacggaaagagctatacattcgatgaagatggtgtatacacaactgtatccgcagcaaataagaaaaaataaaaaaatgccggcagcgaacataaagctgccggcatttttatgatcataaggtataaacaaggattcccaggatgatgatcagatttccgatgatctttccgcgggaaatcttttctttcaggatccgccaggaaaacagcaggacaaaaacataggcggcagtatcaatcaccggtccgaatttcatatccactttggtgtagcaccaggtattcaggagtaacactccaaaaaagataccataggccaggatcacccgccagttcagatattcccggaggggatttttatattccatattggcactctgcttcagaagtacctgggaaattgccgaaaaaaaggttcctgccagcatgatcagcataaacgttctattcatatctctgcaccatccagactccgatcagaacgatcaggatgccgatgatgttctgaagcgaaagattttcgtgaaaaatgatcacagcccatacctgggaccacagaagatagacgcttttgttggcgtaggccgtggaaagggaaaattttttgatcacctgctgccatgcaatggcgtagatcccacagtttgcgatcataagaaaaagaaatacatagagaagaggactatgaagcccttctttattgtaataaaccgatgcaagcttggaaaaaacgctggtaagagaaaacagcaggatattcagatgaagctgaatataatctttgatttttgtcatgtttcctccatatcataaatgcgattatcatagactgataatcaatatatatcatccggcaggtttatgcaagaaaatgtttgaacaatgtaacggtttacaacaggaaatgaaaatgataagattaaacgataagtgtcaattgatacaaaagagaggaaaaacgatatgtgtttatattcagtggttgttcctgtatacaattcagaacatacgctgcaggaactgtacacccgtctggaaaaagtattccgtgaaacgataaaagaagaatttgaactgatccttgtagatgacgggtccagggaccggtcttttgcggttatgcaagaactccgggaaaaagatccccgtgtcaagatcatccagatggcaaggaattttggacagcatcctgcgcttctgtgcggatttgcccacgcaaagggagagttcatcgtaactatggatgatgaccttcagcatcagcctgaggagctccccaaaatgatcaatgtaatgaaggaacgtgacgatgtggatgtgatcatcgcaagctatgaaggacgtaagcataatctgatccggaagctgggcacaaagctgtctgtatgggcaacttccaaaatgctcggcaaggatccgaaccttcagatcaccagttatcgactgatccgccgttttctggtggaagccatgctgaagaccaatacatatcttccgcagattggaaatcttctggttttaagctccaaccgtatcatcaatgttccggtgcagcatgcagcacgtgcatatggaaagagcggatattcttttcgccgccttgtgaaggatctcatctatgatattactgcccatacggcatttccgttgcttatggtgcgaaacatcggcattgccagttttctggtaagctttttactggggatctattatctggtgagatattttctgtgcgggatctcagtagaaggctggacatctctgatgcttgtgatactggcatttttcggactgacattgctttcgatcgggatcatcggtatttatctcatgaatattctcaatgaggccaaaaagatgccgcactatgtgatccgtcaggaggagacagactgatgaaaaaagagatcggcggctatctggaactggaagaaccggcgggacaggaatactatccggatctctgcggcgtgaatctcggaagaacagcgcttttgtggctgatggaagcacgcaggtgcaaaaagatctacctgccattttttctctgcgattccgtaaccggtgcctgtgagaaatccggggcagaaatcgaattttatcatatggatgaaggtctgcatccgatccttgaggagagaacgcttccggaaggagaatatctgtatctggtaaattattatggccagcttaccgatgataagatccggaaatataaaaaaatctatggaaatatcattgtggatcatacgcatgcgttttttcagaagccgctgccgggtgtggacactctgtactcctgcagaaaatttctcggagtcagtgacggagcatatctgtctaccgatgcggaactggaaccggaaaagaagcctctggaccattccatgggaagaatggagcatattctgggacgttatgaatatgatgccggaaccttctatcagaaaatgctggataatgcagcaaattatcatgagatggagatccgccgaatgtcccgtctgaccggaaacctcctcaggactatggattattccggtatcaaagcaagaagagaacagaactaccgtctgctgtcgcagcttcttccttcaaggaatgcttttacaggggaggtgccggagggaccgtttgcctatccgtattatcataagaacggattagagcttcgacgctggctggcaggccggaagatttttgtgccgacaaactggcgtaatatcctggaagaatttgacagggataccatggaatatgactgggctgccaatgtgctgccgcttccctgtgaccagagatacgggacagaagaaatgcagtatatcgcggattccataagagaatgggaggaaacggaatcatgaaacacagattgctgatactgggaacgttgggagaatttgagcagctggtgcagaaggcccgcgaaaaaggatactacaccattgtctgcgacggatatccggatggtccggcaagaaaatttgcagatgaggcatttcagatcccggtaacagatacggaacggatcgcctgtctctgccgagaaaaagagatcgatgggatcatcacatccttttccgaccttcttctggaatgtatggtaaagatcgcggaccgggcaggaatcccctgttatctgaaaccggagcagcttccctggtatcgtgataaatcagcgaccagagcactgcttactgaactgggacttcccactccaggctttcgaaaaatcccgatcgcatattttaaagacaggtccaaaagaactcagctgaaagagctgcttgagggacttcgttatccggtggtcagcaagccactggataaatacggctcccgcgggatctatatatccgaagatctggaggagctgataaacggggcagaaaaaacagcaggattttctgatatgccggagattttggtggaagaatataacgatggctatgaattcaatatgatgacctgggtgcggcatggaaaagtccatgtgatcagtattgcagaccgtgaaaagacatttgttgccaaaggtgagatccccatcagcacaagaaatgtgtatccttccagattattgtcaaaagttgaaaagcctgccacagaacttcttcaggcatatgcggacagaaccggtcagaaagacggagccctttccatgcagtttttctggaagccgggagaaggtatccaggtctgcgagatcgccgcacgatttttcggatatgagcatgaattgaccgatatggtctatggctttaatatggaagagcttcttcttgcatctctctatgatccggataaactggaaaaaatgcttgcagaacacgatgttcataaaccacagtgctgtggagctgtcatttattttcagggaaggcttcttaccattgaagatcagtctgcggcagtccggctgggagagaaagaacaggtggaaaagccctggatcttttatcaggaaggagagaaggtcattgagcatggtcctaatccgtatctggcattatattatgtaaaaacagagaatcgtaaggaaatggatcttctcacagaagagttttatgaggaaatgcatattctggatcccaacggccaggaggtggcataccataatcagatcccggattatgcaccggcagaaaaataggcattgaatttacaacatgagtgtgagaaaatggaatgtgcagttaatgtagaaaaaccatgaagaataagaaataaagaggaaatacatgattgattttaacagacctgcgtttacaggtaaggaatttgagtacatccgtgacgcagtagaacggggaatgctctgcggcgacgggatctacacgaagaaatgttctgcatggatggaagagcgctttcatgtgggtcatgtgatgctgacaacatcctgtacccatgcactggagatggctgcttttctggcagatatccagcctggcgatgaggtgatcatgccgtcttatacttttgtatcaacggcagatgcctttgtgcttcgcggtgcaagaatcgtatttgtggatatccggccggataccatgaatattgacgagaagctgatcgaacaggcgattacagataagacccgcgcgatcgttccggtccattatgcaggagtagcctgcgagatggacacgatcatggagattgccggaagacatgatctgaaggtagtggaagacgcggcccagggtgtggatgcctactataagggaaaagcccttggtaccattggagattttggctgctacagcttccatgaaactaagaactataccatgggagagggaggtgcgatcctgttcaacggggatcagtacctggagaaggcagagatcctgagagaaaaaggaacggaccgcagtaagtttttccgtggtcaggtagataaataccgctggatggattatggatcatcctatcttccgagcgaattgaatgcggcatatctttatgcccagctggagcagcataagaagatcagcgataagcggatgcagatctatgatttttacaatgagaacctcaggtttctggcggaggaaggaaagatccagcagccttatgtaccggaagaatgcacacataatgcacatatgtactacattaaggtacatgatatccaggtacgcacaaggcttctgaaatatctccgcgaaaaggatatctgcagtgtgttccattatgtaccccttcattccgcaccggcaggaaaaaaattcggaagattttccggagaagatgtttatactacaaaagaaagcgagcgtcttatgcgactgcccatgttctataatctggatatggaggatgcgaagagagttgtggatgcgattgcttcctttgacgggttttgacagaagaaggggagagctatgaaaaaaacaaaaaaattactggcagttttcgcagcaatcagtgtggcgttgatgctgccgttacagaccatggctgcagtggatctgaatgcgaaatatgatatcagcaccaaccagatccagggatggccggcaggaccggatattacctcagataccggtatcctgatggatgcagacacaggagttgttctttataacaagggcggagatgaacagagatatccggccagcattaccaagatcatgaccttgctggtggcagtggagaactccaccatggatgagaaggtgacctttacagagaccggggtgcgtaatgttacggcagattccagtaatatcggcacaaaggtgggcgaagtcctgactatggaggattgtcttcatgctctgatcatccagtctgccaatgacgttgcggcacagatcgcagagcatatcggcgggacagagcaggcatttatcgatatgatgaaccagcgcgccagtgagatcggatgtaccaatacacattttgcaaattccagcggacttccggatgataatcattattcttcagcacgggatatggcgctgatcttccgagaaggcctgaaaaatgaaacattccgtacggtcgtgggcacaccggactatatcatccagcctacaaatatgaacagccagcagaggatcctgcatacccatcatcctatgtttgcaccggaaagcggattttactatgaaggctgcattggtggaaaaaccggaactaccgttgcggcagggcatacacttgtcacaggagtgaccagagataataccacatatattgcagtgactatgcgtggaacagagctttccaattcctgtatggacagtacagctatgttcaattacgcatttgagaatttcacaaaaacagaagtaaatggcggctatgtattccttccaaaaggggtggagctgaattcccttaccgagaagtcagagaataccaatgggaaaacagaaaccggttactatttcggagattatctgatcggtaccgcaagtgttgcacaggcaactgatacaccggtaccggaaccgaccgctgcaacagaggacagccaggaagcggaagattccacagaagcagcagaggaagataacagcaaaacaacagagaagagtacagccggagagagtaccagcgaaaaaaagagcattcctgccctgcgtaagatccttcttatgatcatggcagcgatgatcctgatcctgatcgcccttcttgcggctctcagaataaaagaaaagaaacatcacaaataaatcaaaacagaaaaggagaaagaaaaaatgggaaaaataaaagtaacacagtgcggagatattgaaggactgaaagtgatcgagccaactgtatttggtgattccagaggatatttcatggaaacatacaattataacgatttcaaggaagcaggcattgatgtggaattcgttcaggacaatcagtccagctcccgttatggtgttctccgcggacttcatttccagatcagctatccccaggacaagctggtacgtgtggtaaacggagaagtgtttgatgttgcggttgaccttcgtgaaggctccaagacctttggaaaatggtatggtgtagtcctttccgcagaaaacaagaaacagttctttattcctaagggatttgctcatggcttcctggtactttccgagaatgcagagttcacttacaagtgctctgatttctatcatccaaacgatgagggcggactgatctggaatgacaaggacattaacgttgagtggccgatcccggaaggtatggagcttattttctccgacaaggaccagaagtggggaagcttcgaggaatataagaatcgataaggaattgcagaatgaagaaaatattagctttgccggcggagctgtaccagaatcgaaagctggttttaagccttgcaaaaaatgatttcaaaacaaaatatgcaggatcctatcttggtattgtctgggcatttatccagcctatcgtaacgatcctggtctactggtttgtattttccgtaggactgaaggccggaacggtatcggattacccttttgtactctatctggtatccggtatcgtgccgtggtttttcttccaggatgcattaaacggtggaaccaatgccctgatcgaatacaattatcttgtgaagaaggttgtattcaagatcagcatccttcccatcgtaaagatcatctccgcacttttcgtgcatgttttctttgtggcctttgcgctgatcttatgtgcatgctacggatatacaccaagcctttatacattgcagatcatttattactctgtctgcaccttcctttttgtactgggactcgtgtatgctacaagtgcgatcgtcatttttttccgtgatctgacccagatcatcagtatttttcttcaggtgggtgtatggcttacaccgatcatgtgggatatcaatatgctttcttcacatccatggctgatcaagctgtttaagctgaatccgatgtactatgtagttacgggttaccgcgattccatgcttggtcatatcgggatctggaaccatgcttcatggacgatctatttctgggtagttacgatcctgcttttcggactgggatctgtgatattcaaacgtctgaagccgcattttgcagatgtgctttaattgaatgcggatggcggatatccgcctgatccggatctgacagttcccatgggggatttgctctgtaaggataaaaagcagaacggcggcagattgtgagagtgaacgatttacacaaaagtgaggttgaaaatggcagaagatattgcgatttcagtaaatgatgtcagtaagatgtacaagctttacgataatcctatggatcgtcttaaggagtccctgggattatccagaaaaaagaaatataaagagcattatgcgctcaaccatgtatcctttcaggtgcataagggagaaacagtgggaattatcggaacaaatggttctggtaaatccacgatcctgaagatcatcaccggcgtactttcgcccacggccggggaaatagccgtaaacggaagaatctcagcgcttctggagctgggagccggatttaacggagaatattccggacttgaaaatgtatatctcaacggaagcatgatcggtttttccagggaagagatcgatgccaagctgcagtctattctggattttgcagatatcggtgattttatctatcagccggtaaaaacatactccagtggtatgttcgtgcgtctggcttttgcggtagctatcaatatcgatccggagattctgatcgttgatgaggctctttccgtgggagatgtatttttccaggcaaaatgttaccggaagttcgaagagttcaaggaaatggggaagaccattctgtttgtaagccatgacctgagcagcatcggaaaatactgtgaccgtgttgtgcttctaaacaaaggtgagaagcttgcagagggtggtgccaaggagatggtcaatctttaccgtcgtgtgctggtcaatcagtatgacgatgcagatctggaagaaaacacagacgatgcagaagagggacaggcgacggagaaccaggcagccggagcagacgtttcactgaaagcacataccggaagcggtaaagctatgaaggacagcctgaacctgaatcccaaggtcctggaatacggcagtaagcttggcgagatcgtggattttgccatccgggatgatacaggtatgatcaccaatgtgatcgaaaaaggcaaggaattttccgttcagatgaaagtgaagttccaggcagatgtcagcgatccgatctttgcatttaccctgaaagatctgaaaggcaccgagatcacaggaaccaataccatgtatgaacatacgcctctgaaaccgcagaaggcaggcgatgtccgtgagatcaccttcaaacaggtgatgcctctggaggcaggggaatatatgctgtgtctgggctgcaccggatataaagacggcgattttaccgtatttcatcgtctttacgatgtgtgtaacctgaccgtgatcacagataagaaagcagtgggatattttgatctgttttccaaagtatctgtgaaataagtggaggaacgactatggcggagttgaatttagattattatacggcgaaggatcattattccgatggggatatcgaggaaacacttctgaaaatggcacaggaaggcaaatcttttgaagacttgccggaggaagaggtgagttttccaatggtctaccatttttcagggctgcgggagaatatcttaagctggtatcctctgaaaaaggcggattccgttctggagatcggagccggatgcggagccattaccggaatgctttgccgcaaggccggtcatgtgacttccgtggagctttccaaacgtcgggcagatatcaattatgcgagaaacagggataaggaaaatctgacgatcatggttggaaacctgaatgacatgacttttccggaaaaattcgactatgtggtagtaaacggtgtgctggagtatgccatgagctttaccgagggaaaaactccttacgagacatttcttcagcgtatgggcgcttatctgaagccggagggaagacttctgatcgccattgagaacagactgggattgaagtactttgccggagcaccggaggatcacacagatcttcactttttcggaatcaatggatatccgggaaatcagtctgtgcgcaccttttccaagaatgaactgggagagctgctggaaaacagcggctttccttttctgcgcttttactacccgtatccggattacaaatttccgacagagatttttacagatgagagcctttataccaattcctacggaagaagctatcctgtatacacagataagacagcagatctttttgcagaaagtgaaggcgtaaaggccttcgaaaaagagaagatcctggacagctttgtgaattcttttcttgtggaggcaggacgtaccgaaaaccgggacccggaggaaatcctttatgtgaagctgaaccaggagcgaaaagaaaagttccgtcttctgaccaggatcgtccgggagaacggagaggtccgtgcggaaaaagaggctatggtgccccaggctgaggaatttgtggaaaaactggaaaaaaccggaacagagagtactggatccgataaatacaagaatcttccctgcagggcagaaaacggaaagatctcttatccgctccttactggaaaaactcttcaccaggaaatcgcagagcttgcctataaagaagatcttgaagagatcaaggcccttcttaaaaaattctatcaggaatttttcggggctcgtcaggttgtggattacaggaccggagagttccgcgaggtatttggtgatcatccgggaagagaggattacgaatgtgtctgcccggccaatgtggacctgatctgcagcaacatctttatgggagaaaaggaaaatcagatcatagattatgagtggatgtttgatttccctgtgcctgtgaattttatcatgtggcgcctgatccatgaactgtatacacatgtttctgagctgccgcggttatgtcatgaggatgagatgatggcggagtttgacatcagctatacagactatgagatatttatggattggaccatgcatttcgtctatgagtatgtgggctgtggttctctgatcccgtttgaacagaaaaaagtgccggtttccgtaacagagctggtgaacagagaaagagaaaagcatcagatgcacagcaagatatactatgatcttggtgagggattctgtgaagagcatacactttatgcagagggaaaactttccggaaaccgtttccgggtagagtttgcgctttccggtatcaaaggaatacgaaatctccgctggaatcccgcaaacggtcatttcctgaaagtgaggatagagcgtctggattgtggatgcagcgcggagcttgtgcctcagggtgtccatatgaaagtggataacagtaccactgcgttttttaccaccgatggcttttatcttatcgatgttacacacccggaaaatgtggacaggattgtaatagagggaaaacttgactgccttgagcttccggatgtggaaaagcttctggcctttgaaaaagagcgtgaagtacgaagagaacaggagcgtatcagaaaagaggctgaacgtgccgcaaagcaagctgcagaggaagcagcacgtgcgcaggaagaggcccttcgtcatccaggcaaaaaagcgcaggtaaagagactggtcaaaaaggttcttcgctatcatacagagccggcggcagtgatgggagtggagacaactcctacctgtatgggcagtgttgatttcttccattatgagaatggcaccttaaatgccattggctgggcctttgatccgacgtttgcgtctatgggacagccaaggatcgcattttatcagggaacacagaagcttcaggaggcttcctgtactacgatctaccgtacggatgtggctaatgccattggaaatccggatgcggaaagtgccgggttttctttcctggcaacggttcttgcgccggcagagacttctgttttcctggaatacggaaccgcagcggataccggaagattccttatcggaaagatcccgggaaccagggatcagaaagagcttctggtatacgcgatcgaagatccgaagagtatcggaaatctccgccatttcaaacagcgtcatgtacgcagcacgagaaaggcatatccacaggcagtctatcagcagaaggtggatgtgatcgtgccggtttacaacggactggagtattttgatgccctgttttccggaattgaaaaaacgaaggttccttatcgtctgatcatcgtaaatgacaagagtccggatcctgaggtaggaaactatctggaaaaatatgccgcagagcatgacaatgtggtacttctgaataatgagaccaatatgggctttcttccgtctgtaaaccgtggattaaagatggcggaaaatcatgtggctcttgtaaatacagatgtggaggttccggaagagtggctggagcgcctgatgcttccgatctttgcaaaggaaaatattgcaactactacaccgtttaccacctgcggaaccatctgcagcttcccggatttctgccgggataacaaactgtttgagggaatgccgctgtgggagatcgatgatgaattccgcatgatccgtccgcagtatccggctatgcctaccggtgtgggcttctgcatgggtatgaacctgaaagcgatccaggaggttggccttctggatgaggagaatttcggaaaaggctacggtgaggagaatgactggtgccagcgtgccatagctgcaggctatgagaacgtgcatgtggataacctgtttgtatatcacaagcatggtggaagcttcccgtctgaggaaaagcagagacttctgaaagagcacagtgaggcgctgctccgcaagcatccggattacaacaaggatactgcggattactgcagaagagacccgcttcgtccggtaagactctacgtggaaatgaagcttctcaacaggaagctggatgtgcctaccattgtggcctttgaccatgatcttggcggcggcgcaacggcttatcttgtggaaaaaagacgtctggctctgcgggaaggataccgttttgtgaccatccgctataatatcgtaagcaatcgtttttactttacgtatcagtataagcagtatgagatggaattttttgcaaatgatctggaaactgcccttggtgagctgatgcgtgtggatgagatctggatcaacgagcttgtgacctatcagaatctttacggaaccctggaacgtatcctgcgtcttaagagagagcagggtgcgaagctccttatgcttcttcatgatttctttgccctttgcccggcagtgaatctgatcgatgcagaaggaaaatactgtggtgttccatcctgtgagatctgcgataaatgtattccggataaccgcagcaatgcctgcacagaatacggaaccggaacgctctggcgtacaaaattccgggaatttctgtcaaactgtgatgaaatccgtgcattttccgatgatacggcaaggctgttcaagcgtgcttatccggatgtatacaatctccatgtgatcccgcatgcaccccattaccttccggcagtgaaaaaaaataaaaaaaccacagagacctttaacattggtcttatcggcgtactctgctacaaaaaaggcctggaggttgtgaaggcgcttgcaggatatatcgaagagaatgaactgaatatccgtctgagactgatcggtacttccgacgaagagatcgaaagtccggtattttcccagacaggaagatatacaagagaggagatcccaagacttaccctggagcaggatattgatatgttcctgatcccgtccgtatggccggaaaccttctcctacacaacctcggagatcatttccatgggatttccggtagcggtacttccggtaggtgcacctgtagaacgtgtgaaacgctatgccaagggccttgtcctaaaagctgagaagccggagaatattgtggaagagatgatttctctgtggaaaactctcggcgaaagtgagctccctgtggaaaaacgcaggcttcttttcgtaggagaggagatttcctttgcctccagatatcgtgtggagcatttccgggagcagctgattcttaaaggctatgcatcgaagtttatccagatagatcaggcagagcaggaaaagatcgaggaatatacagcaatcgtgatgtaccgctgcagcaagctgatggaagcagaactgcttgccaaccgggcgaaagcagccggaatccctgtttactatgatgtggatgacctggtatttaattacgaaaaaatttccgggctgcatttcctgaagggaagcgagtacagtgacttccgcacaactacagaccgtatccgcggatgtatgggattctgcgacggatattttacatccacggagacactggcaggagagatccgggaagaatttccggaaaaaccggtggtgatcaaccgcaactgtatgagtatggagatggagatcctgtctcacgaggctgtggagcagacagacaaagctaaagaccggatctatatcggatatttaagtggttccaaaacgcatgatcaggattttgcccaggtggaggcagcacttctggaggtgatggagcgccacccggaggtttacctgaagctggtgggtgtgctggatgaatctggaatggagccggtgcagaaccgtatcgagaagcttccgtttatggactggagacagctgcctgccgtgatcgcaggacttgatatcaatctgatgccgctggagaacagcctgttccactggtgtaaatccgagaataagtggacagaggctgcccttgtaaaggttccgagtgtcatgagccgtaactgtgagatggaatacgtggtcgaaaacggaaaagatggctggatgtgcaccacaaaagaagagtgggtcaatgccctggaagctctggttactgatgagaaggccagaaaagccatgggtgaggccgcacatcagaaggttatggaacattaccttacagtaaataccggaaaggatgcaatggaggaattgttatgcagcgagagctatacgaagtagaaaaggacaggtttgacctgaaggacagttctctgtatcaccttcagggaacctggccgaaggatcataagccggaagccgttcttgacggggaaaagcttccggcagccatcagtgcccaggagcgtgtcagcgccctggagcgctttaaggatctggatctggtaaacggagaacgtgtgcagatggaaatctgcctgccggatctggaaggcaaaaagaagcttgttgtttatgcggtaaagggtgaaaaacgtgtccggtggttttctgtttcggcagcacagctttacaggaaacagggaaaaccgcagtactttattgagagcatcgaggtggaagccggggaaaagatctgccgtgtccgtggctgggcagcctttaacagtcccctgaccatacgcctggaggatcgcagccggaaggaaatcccctgcgagatcaccagactgaaacgtgtggatgtacagaatcagtaccaggaaacagaaatcgatgagaagagcggttttttctttgaattccattatgacagtgtgaaggaattctacattgtatttgaggcaggcaatgtgcggacgcttcgtctggtacatctgcagccacagaagcgccttgcggagaaagctgcggtatatttccgtaagggaagccgttacatgaagcttcacggggcagcagcccttaccggaaaggtatttggaaaggtgctggaccgtaaaaaccgtccggtggattattccaaatggattgtgaagcatctgccggacaaggcagagcttgcagaagaaagaaaaacgaaattttccaggaatccaaaattcagtattgtgatcccgctttacaaaacaccggaaaaatatctccagcagctggtagattccatagaagcccagacctacgggaactgggaactctgtctttccgacggaagcggagcagattctcctcttaccgattatctgaacaggctggaaaaaagtgatgacaggatccgtgtgatccgcaacgaccaggcacttcagatcgcagagaataccaatgcggccatgaaagcggcaacaggagattatatcgtatttgcagatcatgatgatgagctgacgccggacgctctgttccggtgtgtgaaagcgctgaatgaggatccggagcttaaggttctgtattccgatgaagataagatgtccatggacgggcacaaattctttcaaccgcatttcaaaccggacttcaatattgatcttttgtgtacagtaaactacatctgtcatctttttgtcgtaaaaaaagagatcgtggatcagatcggaatgctgaaaaaggaatttgacggtgcacaggattatgattttgtgttccgctgtgtggaagctgcgggaagagagcagatccatcatatccccaggatcctttatcactggagatgccatgaggattccacagcagagaatccggaaagcaaaatgtatgcctttgatgcaggagcacgtgccatcaaggctcattatgacaggctcggagttccggtggaaatcgaaaagggtgaatatcttggactttaccgtacaaaattcctctgggaggaaaaaccgctgatctccatcatcatcccaaacaaggatcacatcgatgatctgaagagatgtattgattccatcgaagaaaaggcaacttaccgcaattatgagtatgtgatcgtggagaataacagtacggaggatgagacctttgcttactataaagagctggaagcatccaatccgaaagtccatgtggtgtactgggatggtattttcaactattctgccatcaataatttcggagctgctcatgctaagggtgactatctgcttcttctcaacaatgatacggagatcatcagcccggactgtctggagcagcttttgggatactgtatgagaccggatgtgggagctgtaggagcgcggctctattatgaggatgataccgtgcagcatgcaggagtagtcgttggcttcggcggtattgcgggacactgctttgtgcagcagaagagagacgctaccggatactgccacaggatcatctgtgcccaggattacagcgctgtaaccgcagcctgcatgatggtgaagcgtgaggcctttgataaggttcacggattaagtgaggaatttcaggttgcctttaatgacatagatttttgccttcgtctgggaaaagccggatatctggttgtatacaatccttatgcggagctttatcactatgaatccaaatccagaggtcttgaggatacaccggagaaggtggcaagatttaaccgcgagatcgcttcctttgagaagcactggccggagatcctccgtgacggagatccttactataatccgaaccttacactggagagccaggatttctctctgaagcggatataggaggttatattttggaaaagaaaaaaatctggaaggatgagagagttcaggcaggggttcttgtcctggcagcatttctgctcctgactgcatgggcgtttatgcagcccctgggggcaggccccgatgaaaaaatgcgctacatggtggcacagtatcttcatgagcatccgggaaagctgcctcttggagatgagccaaccatccgtgatgcgacatgggggatttcctatgcctattatccgatcctttcctatatggtatctgctgtctttatggggatcgcaggtttgttccatgcatctgcagacggattactccatgcggcgaggatggcagatgtgctctttgtgactggagcggtatattttgtggtgaaagcatccggaaagctttttccgaaagagggaagatggctgtttgccgcactggcaggctttatgccgcaggcattgtttctgggaacttatgtaaacacggattccctggcgcttttatccatggcgatgatcctgtattcctggtcctgttatctggaagcgagagactggagcttcagaaattcgatccttctggctgttggaatggcagtctgtgcactgtcctactataatgcctacggatggatcttatgcagcttcctgtttttctgcctgacagtccttctgtgcagggaagagccggtaaaacagagagttgcatttctgctccggagagggatcgtgatcgcggcagtaacccttgccttatgcggctggtggtttatacgaaatgccgttctctatgacggagatcttatcggaagaaaagcctgtgcacagtgtgcggaaaaatatgcggctgttgattacagaccgtccagataccctacaccggagaagctgaactggtcatggaaggatatccttctgtatcaggacccgggctggcagcataactggctgctgacagttctggtaagctttatcggaacctttggcctgatgcagatctatatgccttatagtgtgagcaaggcatatttcctgttctttggaatgggtgggatcggtattttgaccatgctgggaatattttatccgaagaaacgtactgtggtaaaagaacgaaaagcagcaggaagtgaaaagctgaagataaaaacaataaccgtgtacgataaatgggacagaaaagggatctttcatctgctgctgatccttctgatcctgatccctgtgggtctgtttatgtattatgtatattatagtgacaaccaggcacagggacgttatatcatgccggcactgtatccggccatgtattttgtgacagccggctggaatcgtctgcttgagcgttttgtaaaaaaggaaaatatcagaatgtggatataccgggtcctgacagcacttctggctgcttcgccgtttttatgctatatcttcctggtagttccgttttatggctgacaccccgatgggtgagatggcagaaaaaaatcccttctatgtatccggatatgaccggtacataggagggattttttaattctgaagtatatccgcctggggaccaagatcaggaacggatgatccggatcatgcgccacagcagaaggatcaggagcaggatgcccacaccgccaatggcaaaatacgggatctgggatctggattcggaataagcttttgcagaatccatgttttcatcattttccagtacatcggaggagctttcctgggagggatcctcgacaactgcagttcccacctgagttccgccaaaggaataggtgcgtaagatctgaccatcagattccgtatcttccgtagtcaggtcgtctgcggtcgcgccggatggaaccattacagtgccgccggacaggatgtgaaaatcatcctcgctgagatccagaagctggaaattggaaaaaccgtaatccagaagtgagatcgcttcgttggctgtctgaccggtcgctccgttcatgactactgcgatcagagtagtaccgtttcgctgtgcagatgtgacaagaacgcttccggaagcagtggtggtactttcacgaccgccgatacatccttcataataggaagcggatgcaggatctgtcatggtaaaagagcttgtcaggttacgggtaccgccggaaacattggtagctgggatcgtataggaggtggctccggagatggtgcggaagctgtcattacggatagccgcctgcatgatcagagccagatcatgtgctgtggtatgctggttgtcatccgggagaccggtaggattggtgaataccgtattggtacatcctagctccttggcacggtcgttcattttctggacaaaggcatccacagatccgccaatctgttctgcgacctggagagcaatgtcattggcagaggccagcatcagagcgtaaaggcactgctccatggtaaatacctctccgagctgtgaggaaatatgagcgcctccgtctgtaacaccggatacaccggtttctgtcatggtaacctgatcgtcaagctggctgttctccagtgccagaagacaggtcatgatcttaactgcgccggccggagaaagcgtggtgtccatatccttggcatagaggatcgtatcggaagtatcttccatgatcacggcagatgcggaagtgatctcaggcccctgaggccatccgctgatcccattggtggtaacaccggaggatacagcaacagcggtttcttctgtggcgaaaactggagtctggaacaccatggaagcggagatcccaatagccagaagcgctgtggttattcttgattttttcatgataaatggtactcctgtataaaaaataattcttatgtaagcaatacatacgtaagtttagtataacacatttcctctcttccttgcaaaaaaaatgatggaatggtaaaatatgttcatcaaactgttactgagaacagagtgaacagtaacatcaaactgagtaatacggagataatatatgagtaaagatgattctacaggaaagatccaatgggacagacttataaagaagctttccccctatacagtacagaagggcttaagatacctgaagcattatggcctgaaagagttctggatccggcttcatgagcgttttgaaccggaagaggttccttacggaccatggtatgaggcatacagacctgacgaggaaacactggagaagcagcggaaacgcaaatttccggatgggccgttgatcagcattgtggtacctgcatatctgacaccggagcgttttttaagacagatgctggactctctccttgcacagacatatgagaactgggagctgtgtctggcaaacggaagcccggaggatccagacatgcagactgtgctgagatcctatgcagagatggacaggaggatccgctatcaggatctgaaagagaatcttggcattgcagaaaatacaaacgcggcttttgccatggcagagggtgattttatcgcatttctggatcatgatgatctgctggcacctaatgcattgtatgagatcgcggcggcactggaggagcatccagaggcggatgtgatctatacagatgaggataaggtcacgacagatctttctgaacattttcagccccatctgaaaccggactttaacctggatcttttaagatccaataattatatctgccattttctggtggtaagacgttccgtagtgcagacagtgggcggattccgccgggaatttgacggcgcccaggattatgatttcattttccgctgtgtggagcaggccagggaagtggtccatgtaccggagatcctttatcactggaggacccataaatcctccacagcagataatccggcaagcaagatgtatgcttttgaagccggcagacgtgccattgaggggaatctcaaacggaccggaactccgggaaccgtggagcatactccggattttggattttaccgtgtgaagtatccggtgcagggagaacctctggtttctgttatcattccgaaccgtgaggagaaagaaacgcttcaggcctgcgtggaatccatttttgaaaaaactgcctacaaaaattacgagatcatcattgtggagaataacagcagctccgaagagatcttccggtattacagaaagctttcggaggatcccagggtccatctgatccgctggaaaaaaggcttcaactattctgccatcaacaatttcggggtgcgccatgccaaaggagattacctgctttttctgaataatgacgtaaaggtcatcgatccggactggatgtcagagatgctgagcgtgtgccagcgtaaggaaacaggtgcagttggcgtcaagctgatctatccggataacaccattcagcatgcaggctgcgtggtgggaatgggcggaattgccgggaacatgtttgtgaatatgccggcagagcgtaccggatatctccataaggcttctcttctgcaggatatgagctgtgtgactgcagcatgtatgatgatgaagaaggaagtttttctggaggcaggaggctttacggaagagcttgcagttgcgtttaatgatgtggatctctgtctgaaggtgcgaagccacggccatctgatcgtctatgatccgtatgtgaagctctatcattacgaatccaagtcaagaggcactgaggacagcgaggaaaaggtccgccgtttccagacggagatcgaatacatgcgctgtcactggctggatatcctgaaaaaaggagatccatactataacaaaaatctttctttaaccaaatggaattattccctgaagccccttccgggaatgggaaagaagaagggataaagcaatgcaggaagtaacagtagtcataccaaactttaacggaatggcatatctggatggtgttctttccagtcttgaaagacagactatccgtaattttgaggttatactagtggataatggttccactgatggcagctgtgcatttgtttcagcggaatatccatgggtacacatgatacagcttccggagaattacggcttcagcagagccgtcaatgaagggatccatgcggcacgttccccatatgtgctgcttctgaacaatgatacggaagcggaaccggatttcctggaggagatggttgctgccctgcgcagacataagaaggcattttcctgtcaggcaaagatgatccagcttcatgacagggacaagatggatgatgccggaaattattactgtgcccttggctgggcttttgctaggggaaaaggcaaggatatccgccattatgaccgagagcagaagattttttccacctgtgcgggagctgcgatctaccggaagaaatttattgacaggattggagattttgatgaggagcattttgcttatctggaagatctggatatcggctatcgtgccaggatctgcggttatcagaactggtatgctccaaaagcgaaggtttatcatgtaggaagcggcaccagcggctccagatataatcagttcaagatccggtattcttccagaaacaatatttatcttatctataagaatatgccgtttttccagatcgtgctgaaccttccgttttttctggtgggattcggtgcgaagatcctgttttttgcgtccaagggattcggacgtgagtaccttgcaggcatcaaaaacggctttcagatcagccgcaaaaacaaaaaagtcagattttccatgaggaatcttccgcgttatatacagctccagtttgaactctggatcaacatttttaggcgttttgccggttaagacatcatattttcacagaatttttatatttcggagggaagattttattgcttttgagtttcatctattataagataaaagcaatgaacttaaatgaggtggcggaaattgattaaagacaaccagaaaaatttcagtcgtctccatatgctgatcgatgtatttgtgatcgcggcctcctatgccctggcctggttgatccgttttcagggaatttttgaacattcggcggtccagtccaagaccgtccaggaatatatgtttatgctgatattcattattccgggatatttacttctttatcaggcctttgatctttatacaccgatgcgaatgcaggggcgtcgtctcgtacttgccggaattgtgaaggcaaatgcgttagggctccttatcatcatgtttgcactttacaattttaaagagctggactattcccgtcttactctggtttctttctgtgtgatcaatatcgtcctggaatggtttgtgcgtatggtcatattttacattctccgggatatgcgcaaaaaaggaatgaaccagaaacaggtgctgctggtaggatacagccgtgctgccgaggaatatgtagacaggatcctgcagaatccgcaatggggatacgtgatcaggggcatactggatgacaatgtgccggcaggcactacttataagggcgttaaggtgatcggtcgaatcgccaatctgatgatcatccttccatccagtcgtctggatgagatagccattaccctgggcttaagtgagtattatcgtctggaagagatcgttgcactctgtgaaaaatccggcgtgcacacaaaatttattccggattataataatattattccgaccaaaccatatacagaagatattctcgggcttccggtgatcaatatccggtatgtgcccctgagcaacacgtttaatgcactgatcaagagatctatggatattgcaggcgcgatcgttgcgatcattgtgtcctcaccagtgatgctagtgttgtgtatgctgatcaagctgacttcgccgggaccgctgatctataagcaggaacgtgtcgggcttcataatcagactttccggatgtataaattccgttccatggagatccagaaagaatcagaagaaaaaaaggcgtggacagtaaagaacgatccaagagttaccggaatcggtaaatttatgcgtcataccagtctggatgagcttccacagctttttaacattctgaagggtgagatgagtcttgtgggaccaagaccggagcggccgttttttgtagaaaagtttagggaggagataccacgttatatggtcaagcatcaggtgcggccgggtcttaccgggtgggcacaggtaaatggctatcgtggagatacttctatcagaaaaaggatagagtgtgatctgtattatatcgaaaactggtctgtgggatttgatataaagatcatgtttcttaccatattcaaaggatttattaataagaacgcatactaaaaaggggaaaaggaaaagatgtcaaaacctcggaaaaaaagcaagaagattttatttatcctggagatcgtcgtactgctcctgtttatcggaggtctgttcgtttatggtcagatctcagccaaactggataagatcgacatccaggaaacagatcttgcagaccaggatattgtaaccaatgatcaggcaccgcagatgacgggatataccacctatgcactgttcggactggaccacagaagcaagaatgagaagctgaatacagagaacagtgataccatcatcattgcgagtatcaacaatgatacaaaggcagtcaaacttgtgtctgtctatagagatacccttctcaatgtaaaggatgatacctattccaaagccaattcggcatatgcatttggcggaccgaccaacgcggtttccatgctgaatacgaatctggatctgaatatcacagattatgttgccattgattttaatgcgctggtaactgtggtagactgcctcggaggattggacatccctctttcctatgcggagatcgttcatatgaacaattactgtgtggagacatcagaggaaaccggaaagagttacacaccgatcgaactgccggatccgaagccggaggatgaggaagcgatcgtagatacctatcatcttaatggtgtacaggctacctcctactgccgtatccgttatactgcaagtcttgatatgggacgtaccgagagacagagacgagtgatccagatgatcgtagataaggcgaaaaaggcaggactttccactatctttgatattatggatcaggtattcccgatggtcaaaacttctgtttccaaaacagagatcctgaagatgatcccggctatgatcggctatagtattgatgaaactacaggcttccccaatgattataaatttgctcaggtaaagggcagcgttatcgtacctaccacactggaatccaatgttctgaagatgcatcagtttctgtatggagacaccagttacactccgacgcaggatgtactcaacagaagtgcccagatcacaaatatcgcaggcggaggcgacgtgcaggacactgcacctgcggtgacagatacaccgaatgacgcaacggatgattcgtacacgtggcagggagatacatccacagattacagcagtacggacacaagtgatgatgctgattacagcacagacacagattatgattcggattactccggagacgattacagcacagatacggattattccggagacgattacagcacagatacggactattccggaggcgattccgatacggattataacgattataccgacggagaagattattcggagaatgaataaaacatcaaaataagcaaccagcagaagggaccatccagtaacgggtggtcctttctggacaggagacaaatatgaaaacattaaaaacagacgtgatcatcccggcataccgtccgggagaagaatttgaaaaactgctggaaagactcagcgcacagaaatatcctatcaataagatccttgtcatgaatacagaaaagaaattctggaaagagacctgggaacaggaatatccgcttgtggaagtccggcatcttacaaaagaagaatttgaccatggcggtaccagaaggcaggcggcagagctttcggatgcggagatccttgtatttatgacacaggatgcaatgccggcagacagggaactgatcggagcactggtaggagctcttgcagagaatccacaggcaggagccgcttatgcgcgtcagcttccaaaaaaggactgcagatttctggaaaaatatacccgttcctttaattatccggaacagtcctgtctgaaaacggaaaaagatgtacagacctacgggatcaaaacctatttctgctccaacgtttgtgctgcttatgatcacaggatctatgatgagattggtggatttccggagcatgctatttttaatgaagatatgatctatgcaggctggatggtaaaaaaaggctatggagttgcctatgtatcagaagcgcgtgtatatcattctcacaattatacctgtatgcagcagttccacaggaattttgatctgggagtttcccaggcggagcatccggaggtttttgagggtgtgccatctgaaggtgagggcatccgactggtaaaaaaaagcatggcatatcttctgaaaacaggccacatatggctgatccccggactgtttttgcaaagtgtctccaaatacgccggatattttctcggaaaacgatacaaaaagctccctgaaaaaatgatccgctcctgcaccatgaatccggaatactggaaaaagaacaaataagagcaggtcacggttttttaaaagagatatcacagtttaaacacaattccctgttaaactgtcttttataagagaaataaatgttactgagaacggagtgagcagtaacagatacatgcatcagataacatagaagggagcaccagaggcatgagtgaagagaataaatgggggacaggcttgccggatgaggataagaatgcttcggcagaacagaaaccgctgacgcatccttattctgagggacgcaggatgcaggagagcggacaggacagttatgcaggtgccggacagagtgaaggcacttcgcaggagaaaccaaaatacggacattatgaggtgcatcagcctcaggccggtaattatgccggtggaaatataccgcccaaaaagccgcggaaaaagagagatttttcaggccacaacagctttggaaagaaagcagccactgtggtggcactggctgtgatctttgggctggtagccggagtagtttttcagggtgtgaatattgcagcagataaatacagaggaaatgacagcagtacaacgatcggaaagacagaaacagttaccgggacagaggacagtactgacagtagctctgcggattctactgtgaaggatattgtggcagagagtggtacagtggccggtgtagcccaggcaaccatgtcttctatcgttgccattacatctgtcagtgtgcaggaaatcccaagctttttcggatatggaacgaggcagtatcagagtgcaggaagtggttccggtattattgtaggagaaaatgacagcgagcttctcattgcgactaacaaccatgtggtatctggagcgactacacttactgtgtgctttgcaggcagtgatgtggtaggagcggaagaagaaacccaggctatggcaagcagctccgatggagatgcggatgtggataatgcagtttctgccaagatcaaaggcaccgatgaagagaatgatctggcagtggtggcagtggagaaatccgatattccggatgagaccatggatgagatcaagatcgcacagatgggaagctcggacgatcttgtagttggtgagcaggtggttgccattggcaatgcactgggctatggacagtcagttacctccggatggataagtgcccttaacagaagcattagtacagaggacggagaagccagcggactgatccagactgatgcagcaatcaatcccggaaatagtggcggtgcacttctgaacatgaacggtgaagtgatcggtatcaatgcggccaagtatgcagacagtcaggtggaaggcatgggatatgccattccgatctccaaggcagagccgatcctggaagaactgatgaaccgcgaaaccagagataaggtggaagattcttccaaggtaggatatatgggagtcaaggctgctgatcttacaacagaagccatccagatgtataatatgccggcaggtgcttttattactgaggtaacggaaggtggcgcagcagataatgcagggatcaaaaaaggcgatatcattgtgaagctggatggacagaaggtaagcggcaaggatgaccttgttgataagctgcagtattatgaggcaggagaaaccatcgaagtggtgatctccagagcgaacagcggagagtacaaggaacagacggttgaagtgaccctcggaagcaaaccctcttctgacaaataaaagaaaatacaggataaccatttataaaccggggagctgcataagaacatgcagctccccggtttataaaaacttaatttgatacagccggattatgtgctataatatgcataataaaaaccagaaaggaaatgttatggcagatcagtttgataataataaagacaatgaccaggagcagaaatacgagaaattctgttttttatgccgcagaccggagagtcaggcagggaagatgatcgaccttcctaatcatatacatatctgtgcggattgcatgcagaaaagctttgatactatgaacacccagatgaacaatggaaattattccgatctttttaacatgccgaatgtgagcatgatcgatctcagcagtttccagaatcccggaaaccaggcgaagaagatcaagaaaaaatcagagactccgaagccggtgatcgatctcaaagatattcctgcaccacataagatcaaagcaactctggatgaatatgtgatcggacaggaatatgccaagaaggtaatgtctgtaggtgtatacaaccattataaaagagttgccacagataccatggatgatattgagatcgagaaatccaatatgctgatgatcggacctacaggctgcggtaagacttatctggtgaagatgcttgccagacttcttcaggtaccgcttgccattgcagatgccacatctcttacagaggctggttatatcggtgatgatatcgagagcgtagtatccaagctccttgcggctgcagataatgatgtggagaaggcagagcacgggatcattttcatcgatgagatcgataagatcgcaaagaagaagaataccaaccagagagatgtcagcggagaggctgtccagcagggacttctgaaacttctggagggaagtgaagtggaagttccggtgggtgctaccagcaagaatgccatggtacctatggtgactgtaaatacaaggaacattctgtttatctgtggcggtgcgttcccggatcttgagaatatcatcaaagaaagactgaataaacaggcgtctatcggattttatgcagatctgaaggacaaatatgatgatgatccgcatgtgctggagaaagtaacggtagatgatctccgtgcatttggaatgatcccggaatttatcggtcgtcttccgatcatctttaccctgaacgggctgacggaagacatgcttgtgaagatcctcaaggagccgaagaacgccattctgaaacagtacaagaagcttctggcactggatgaagtaaaactggagtttgaggacggtgccttacatgccattgcccgtaaggcattggaacgccatacaggggccagagctctccgggctatcctggaggagtatatgctggatatcatgtatgagatcccaaaggacgacaatatcggtgaggttgtgatcacagagggatacattcagggcaacggaggtccgaagatccttatgcgtggccaggagatcccggcactggaagggtaagaaacaagaagattctttaatatataaaggagcgtgacagatatggcaaaaagcagtttttgggatgatctgggaaacacactgacaagaaaggcaaagggcttaagttccagggcagagaatctctatgagatccagaagatccgtaacaaactctctgcacaggagcgtatgaccgaaaagctgatgatggatatcggaaagatgatctatacacgttatgagcagggagaagccgttgacggtgagacgggagctatctgcgaggagatcagccagcatatgctggaggcagatcactacagagatgcgatcgctgccagcaaaggggagaagttttgcccggcctgccataaggcggtgatgcgggaggccagcttctgtccgtattgcggagcggcgtgtcctacagcggagctggaagagaaagctgccgatgtgatcgagcaggcagatgaggagcttgaagaggctgctgaggcagaggtgacagaagtaccggagacagaagcggaagaaaacgcagaaactacagaagtggcagcagatccggaagagacagtagaagcgtcagaagtagtagaaacagcagaaaccgcagaagcgtcagaaacagaaacatcaggatcagatccggaattggaagaggaaagaacggaagtgggatctacagaaacagaggagcctgcggctgatccggaaaatacagaaacaatagaagaaaaaacagaataaccataagcatataaggcaggctttccccagtgggagcctgcctgaatattatgcagaccacagaaataaggagggggaataatgttgtggaatttactgacggcgggaatctttggtacagactattatataaagaaaaaaatcaacacatcggaaaagaaagatctgaaggaaaagtgcctgggaggcagactgatcgtaagaaattgccataatcatgggatgatgcttggaatattaaaaaacaaagataaagaattcctgagagatcttgcatctatggtgctgggcggtgcgatctgggagtatatacgtacttccggagaaaaaggcacacgcatatccaagcttgggctttccatgatcctgggcggcggtctgaataattatacggaacgtcgcagaaagggatacgtcacggattatatgagcctgaatgtggaaaatccgaagcttaagaaggtcgtatttaatatttcggatcttttcatatttacaggtgcgcttctctggggcgggagcgagatcttttctgaaaaagaaaaataaataaaaaaacagaagtgccggtgttgggcgcttctgtttttttgattttggataaaataaaaaagaatgcaggaaatgggacttgaacccacacgatcttgcgaccacaggcacctgaagcctgcgcgtctgccaattccgccattcctgcattttttcaaccggcttgctttgctttgtttgctccgctcgtcgactgctcacttataataactcaggaattggataatgtcaatagaaaaattcaaaaaaattaaaaaaattcaaaaaaaatattttaagttagttttatacattttttttgcatatggtgttgaaaaatgacgattcctgtgatacaattttgaagatttaggataaaataagagaacaaagaaagggagattgtatgaaagcatttctgatattggaagatggccatgtatttacaggaactagcattggttctgcaagggaagtcatcagtgaaattgtctttaacacttccatgaccggttatctggaagtaatgacagatccttcttacgcaggacaggcggtgtgtatgacatatccgctgatcggaaactacggaatctgttatgatgaccaggaatcaaggaagccgtggattgacggatttattgtacgcgaattatcacgagttcccagcaacttcagaagcgtagacaccattcagcattttctgagcaaaaacgacattccgggaatcgcaggaattgataccagagcactgactaagatccttcgtgagaagggaaccatgaacggaatgatcacagttgatgagaactatgacctggatacaatcatccccagattaaaagcatatacaacaggaaaagtggtagagaaggtttcctgccgcgaaaaggaagtgcttaaggggaacggaccgaaggttgcccttcttgatctgggcgccaagaaaaacattgcacgctcactgaatgagagaggatgccaggttactatttacccggctctgacatctgcagaagaaatccttggagacaatccggacggcatcatgctcagtaacggacctggagatccgaaggaatgtacttctattattaaagaaatcaaaaaactctatgactctgatgtaccgatctttgccatctgtcttggacatcagcttatggctcttgcaacaggcggagacacccataagatgaaatacggtcacagaggcggaaatcatccggttaaagaccttgagacaggaagagtatatatttcctcccagaaccatggctacgttgtagacgcagagggacttgaggagaaaaatatcgcacatcctgcatttgtaaacgtcaacgacggaacaaacgagggtatggcatataacggaaagaacatctttactgtacagttccatccggaagcatgccctggaccacaggattccagttacctttttgacagattcatgaagatgatgggaggagagaaataatgccaaggaataaggacataaaaaaagtacttgtaatcggctcaggcccgatcataatcggccaggcagcagagtttgactatgcaggaacccaggcatgccgctccctgaaggaagagggcatggaggttgtacttttaaactccaatcctgctaccatcatgacagataaagacatcgcagacagagtttacatcgagcctctgactgttgaagtcgtagaacagctgatcctcaaagagaaaccggacagtgtacttcctacactgggcggccaggcaggtctgaaccttgccatggagcttgaggaaaagggcttcctgaaagagcacaatgtacgtctcatcggtaccacagcagcaacgatccgtaaagctgaggaccgtcaggaatttaaggatacaatggaaaagatcggcgagccggttgcagcatccaaggtcgtaacaactgtagaagacggtgttgcgtttactcagactatcggttatccggttgttctccgtcctgcatatacacttggcggaagcggcggcggtatcgcgcataatgagccggagcttcgtgagatccttgagaatggtctccgtctttcccgtgtaggcgaggttcttgtagagagatgtatcgccggatggaaagagatcgagtacgaggtaatgcgagacagcgcaggaaactgcatcacagtctgcaacatggagaacattgacccggttggtgtccataccggtgactccatcgtagttgctccttcccagaccttaggagataaagagtatcagatgctccgtacatctgctcttaacattattacagagcttggcatcacaggtggatgtaacgtacagtacgctcttcatccggagagctttgagtactgcgttatcgaggttaaccctcgtgtaagccgttcctccgcacttgcaagtaaggctaccggttatccgatcgccaaggttgcagccaagatcgcactgggttacacactggatgagatcccgaacgccatcacaggcaaaacatacgcaagcttcgagccgatgctggattactgtgttgttaagatcccgcgtctgccatttgataaattcatcacagcaaaacgtacactgactacacagatgaaggctaccggtgaggttatgagtatctgccataacttcgagggcgctttaatgaaggctatccgttccctggagcagcatgtagacagtctgatgtcctatgatttctcacatctttctgatgaagaactgatggacgagctgaacattgtggatgaccgccgtatctggaagatcgcagaagccctgagacgagatgtttcccaggagaagcttcatgatatcacaaagatcgacatctggttcatcgataagctggctatccttgttgagatggagcaggctctgaaaactcagaagctggacaaagaccttcttctggaagcaaaacgtctggagttcccggactacatcatcgcagacctgacaggaaagacagaagctgagatcaaagacctgcgtaaagagtacggcatccgtgcagcatacaagatggttgatacctgtgcagcagagtttgcggcagcgacaccatattactattctgtatacggcgatgaccagacagagaacgaagcaatcgagacaaaagataagaaaaagatcctggtacttggttccggcccgatccgtatcggacagggtatcgagttcgacttctgctctgtacattgtacatgggcatttgcgaaagagggatatgagaccatcatcatcaacaacaacccggagacagtaagtacagactttgatattgcagataagctgtattttgagccgctgacaccggaagatgttgagaatgttgtaaatatcgagaaaccggacggagctgttgttcagttcggtggacagacagccatcaagcttacagaggcactgatcaagatgggcgttaagatccttggaacatctgctgagaacgtagatgcagcagaggacagagagctctttgatgccattcttgagaaatgccagatcccgagaccgaagggacacactgtattcacagcagaagaggcgaaaaaagctgccaacgagctgggatatccggtacttgtccgcccgtcctacgtacttggaggacagggaatgcgtatcgctgtcagcgatgaggatgtggaagagtatatcggaatcatcaaccagatcgcacaggagcatccgatccttgttgataaatacctcatgggtaaagaaatcgaggtcgatgcggtatgcgacggtgaggacatcctgatccctggaatcatggagcacatcgagcgtgcaggtatccattccggagacagtatttccgtatatccggcacagaccattagccagaaagcaaaagataccatcgccgaatacacacgtcgtcttgcacaggcacttcatgttatcggtatgatcaatatccagttcatcgttgtaggcgaggatgtatatgtgatcgaggttaacccgcgttccagccgtacagtaccgtacatcagcaaggtaaccggaattccgatcgttcctcttgcaacaagagtcatccttggccgcaagatcaaagagctgggttatacaccgggacttcagaaggaagcagagtactttgcgatcaagatgccggtattctcctttgagaagatcaggggcgcagatatcagcctcggacctgagatgaaatccacaggtgagtgccttggtattgcaaaaacctttaacgaggctctttacaaagccttcatcggagccggaatccgtcttccgaagcacaaacagatgatcatcactgtaaaagatgaggataagaaggacatcattccgatcgcaaaacgtttcgaagctcagggataccgtatctttgcaacaagaggtactgcaagcgtactgactgaaaacggaatcaaggtaacacgtaccaacaagctggagcagccgtctccgaacctgatggacctgatccttggccacaagatcgatgttgttatcgacacacctccacagggtgttgagcatcagaaagatggtttcgtgatccgtcgtaatgctatcgagacaggtgtcaatgtgcttacaagccttgatactgcagaggctctggtcacaagtcttgagaatacagacctgaaccacctgactctggtagatatcgccaccatcgacaatcgataaaaaattgtaaattttgtgaaataaaaaattaaaagtttacgaattgtcaaatatgtaatatactgataaggacggggccgtcgttcacataccggccctgtccttatcttgcttttagaaaggagttaacatgatttttatagaattactgaaggttatccttctcggtattgtggagggaatcaccgagtggcttccgatcagcagtaccggacatatgatccttgtggatgagttcatcaagctgaatgtatccgaggcatttatggaatttttcctggtggtgatccagcttggcgcaatcctggcagttgttgtactgtactggaacaagctgtggcctttttacataagaaaaatcccgaagaaaacacagatggcactgcgtaaacagccggcagtacccagaactgcccttacttttgtagaaaaatactgtgataaggataagtggatcctctggtttaagatcctggtagcatgtctgccgacgatcatcatcgctcttccttttaatgacattattgaaaagaaattttacaactatgtggtcgttgccatcatgctgatcgtttatggtgtgctttttatcgttatcgagaactacaacaaacgccgcagaccaacctgcaccagactggatgaactttcctttaagacagcgctgatcatcggctgcttccaggtgctttccgtgattccgggaacatctcgttccggatctaccattatcggaggaatccttgcaggaacatcccgtacagttgcagcggaatttacctttttcctggcaattccggttatgttcggagcaagtcttctgaaactggttaaattcggttttgccttcagctccacagagctgatcattctgatcgtaggtgttgtggtatcctttgtggtatctgttcttgccatcaaattcctgatgggatatatcaagaaacacgattttaaagtattcggctggtacaggatcattcttggtatcctggtgctcggatacttcgttggaaaaagatttttagcataaaactgcaatctggaggtaatcattatgaaatataagaagcttttgatcgtactgacagcagtgacggcgcttggtattgccggctgtggaaaatcatcaaaggaaacagcagaggtgacaccaacaccggttcctacagccgcacctacggctgcaccggctacatccacaccgcttcccacatctacacctgcaccgaagctgatcggtgtaaagaccagtactgcaaaatttgtttatcttaccaacagcacgaagggagagatccgtgagatctatctccgcgcggcaggaggggaagaatggggcaaaagtcttgttcctgcagaagctaccatcaaagatgcggagcaggtgcagatgtattacaccccggattctgcaagagatgccatctatgatatgaagattgtagacggagacggaaatgcctatgagatctacagtgtacagctgagtgatatggaaaaggcaaaactgatgatcgataacggagaagcatacctgacctatacaagcctcagtgacaagagtgagaagagcactattggcaatgtggaaacggataacagtgaggcggacagcagtgattccgcagacagcacagatgcttcagatctgacagatagttcttccggtatcacggatacttcttccgacaacagtgatggaagctatgacaacagtgatgatggaagctatgataacagtgatgacggaagctatgacagcagtaataacggaagctatgacaacagcgatgacggaagctacgacggcagcgatgacggaagctacgacaacagcagtgatgatggaaactatgacagcagtgatgatagcggcgactatgtagatgacagcagcaacagcggaagcggtgacgattctcttgacaacagtacagatacagatgacagcggagacggagagcttgtctgggatgataacggagactggtcagaggaataaaccgggatcctgtaaacagagggaaacatggaacagacatttcttgaaaaactgaaacgagtaaaacctggggatctgcttcacatcatcaagtttatcctggcatttcccattgcgatggtctacagactttttcgcagggatctctggcttctctgtgatacagagaatgaatgccgggataacggattctggctgtacaaatatctgagagaaaataccagtgaggatgcagtgtacgccatcaatagaaaatctccggattatgcccgggtaaaagatctgggacctgtgatccagtatggaagctttcgccactggatctactatctggctgcatcaaaaaatatcagctcccagaaaatgggaaaaccaaacgcagccatctgttatgtgctggaggtttacggaatcctacggaacaagcgggcgttcctgcagcatgggatcattacggcagatcttagttttctgtattatccccatacaaaaatgagcctttttgttaccagtacctatgatgagtggaaatatgtcaatgaccggtacggatatccggaaggctatgtgcaggagctgggattgtgtcgttttgatcagcttcatgatatgaagataaaaaagaaccagatcctgatcatgccgacctggcgtatgtatatccgcaatgagatctcagcctctgatcacgagctggaagcacagaaattcatggaaaccgattattaccgttactgggatgcacttctcaaggatgagagactgatccgctacattgaggagaacgatcttcagatcatcttttatccgcacagggaaatgcatcggttcctgaaatattttcatgtggatcatccgaagatcacagtggcgtcctggcctgagtacgatgtgcagacactccttaaagagtccgcagtgctggtgacggatttttccagtgttgccatggactttgcctacatgaaaaagccactggtctactaccagtttgacaatgaaaaattccggcaaagtcatcatcagattgggtattttgatttccggaaagatggcttcggtccggtatgtgtaacggaacaggaagtaacggactggctgatccgcctgcataagcagggatttgccaatgaagagatctatctggaaagacacggaaaatattttgatctgtgggatacaaagaactgtgaaagaaattacaaagcaatcaaagaaatgtaacaggtggtgaaaaattgcagcagttaatggaagctccggcggagatcaaggtaaaaaccagaaaattttcgctgacaaaaggaaccataaagatcagttttgagctggaaggatccagaggaaggatccgttccctgaagctgaaacagcgaaatgcagtgctggatacaagttttccttttgaaatgcagacagcaaaaaaaggaaatacgatcgtgtatcatgcacagatcaatgtagatcagtatccgatggaaaccgcattctgggatgtggtggcatctgtggataaagaaggaaaaggaaattatgaggatgcgatcctgggaggcttaagttcaaaacttaaacttaagctgatcctttttccaagatggaccagaaccggggatgggcatatggtttatccctttgtcaacggagcaaggcagtttaccattcaataccggaaatatgatccgaaatatgacagctatgcatttatagcaaaagaatttcttgcattattctgctattttatcctgaaaccttactgggatcataagaaattatggctgatttgcgagaaatactgtacaatggcacaggacaacggcctctattttttccggtactgtatggagcatgcaccggagaaggacagaagtcggattttttatgtaatagataaaaaatgtccggattatcaggctgtaaaagagtatgatgccaatgtgatccagttcatgtcatttaagtacatgatttatctcagcgctgcacggtatctgatatctaccgatgcgatccggcatttttatatctgggattcgcccaacagcatctacaaggttctgtatcaggcacggaagaacatcgtatttctccagcatggagtgatgggcttcaagcaatgccacaggacctttcataaaggcggaggcaatcagatggcactgtttgtggtgtcttcgggttatgaacagaagatcatccatgattatttcggatacgataatgaagagatcattatcaccggactggccagatgggatgtgctggaggacaagtcggatccggctcataaagagatcctgctgatgcctacatggagaagctggctggaggatatcagcgaggatcagttcaaaaaaagtgaatactatcagcgttataaagcatttctgcaggatgagaggcttaagactcttctggaaaaggaaaatatcacgctgaatttttatatccatccgaaattcagggaacatatccggagctttcaggtggaagacaggcatatccgtctgatcccatttgggactatgccgctgaatcagcttctgatgagctgtcatatgctgatcaccgattattcttctgtttcctgggatgtctactatcaggaaaaaccggtggtattttatccctttgatctggaaacctatgataaagtccagggaagctatatggactacaaaaaagatgttttcggagatctggcatgggatcagaaccagctggtagaccttatcggagaatatgcgaggaacggattccgtgaaaaaccggaattttcaggaagaagagatgagcttcttccctacagggacaatgacaacagcaaacgaatttatgaatatatagccaatgctcaaataccggacaaactgaaaagaaggctgaaagagaaaaaattttaatgtaaggatacaaaaggagcaatatgaacagggagtatgaattttcagtagttgtttttgcaaaagataccgcaaagctttacagaacctttaaaaatgtacgtgaggtcacaccggaaggaacggtacagatccttgcagtatgcattgcaggagatatggatattcctgatgaacgggacatgcgggagctggaggaagccggagaaaaggagaaagagctcaaggacgaagagctggataagatctacggagagttcaatccggaggatcctcgtttccgggagatgctggatgaccgggatcttttatatattgacggactggaatgcggggatcttgtggcggagctgaaggataagatagccggaagctatgttgtttttgcaaaagccggaatccgtttttccccaaaatccagtgcagagatcagacgctgctttgaggaagaaaacagagatgttgtcctaacaaagatccgtggaaaaggaaatatccatgtgcgggagcataataattactgtaaccgtttcaccgaaaaaacaacgctggataacaatgtatatcttctgcatcagctgtataccgcttacacatttgccgcagatcaggtgaaatgggtatccgagatccgtccggagatctggtatctggatgtgatgaccatggtatatcagtccgttgtaagctgccggagtctgggagtggcttcaggggaagatatctatgtgcagatccttgcggatcatctcatggtggaggactggaagaatatgctgcaggatccggaccagctggaggtattttatcaggaatttttccgaaagatcgcagactgcagaataaaagaaaatcctgttcatgaaaaaaatgcagattatgtgctgctgtattacagcgcaaaaatagctgatatcatatttgataacgagaagcttgatgaagagaaaaagtgcagatatgaggaaggtatcgaaagcttcctgaagcagatggagtttccggagatcgtgatgtccaatcagcatatcagcagggcaaacaaagtatatcttctccggaaatattatccggatatatgcaaaaaaattccggatcaggcagacacgatcctgaatcccatatatgataatctccgtgtcaagatattccagccggaaaaagaccagctgcactgtgaattttccattgtggagcctgtgagcaggacaaatcgtgcatatatgatgactggtggcaacacctatgaagccagatggaaatatacactgggaagaaccggctggtgcagagaagaaagtgccgttgagaagctgtatatcgtggacatcccgctttctgagatccgggagtttatcagctggggcacaggcacagatggaaatgtaaacaaaatgtacaatatttcctacggaaaatatgtgccatttacaaagaagctaccgcttttcctgcatatagaggataagcttctgtatcttaacgaaaaagtccggatgatccgtggagaggatcaggaagatgcaaaggttctgggccatcagtatgaagtaacggtagagccatacagtcagagcagggagaaacagctgaagaaaaaacgcaccaaagcaatattttctcagggaaaggccggaaaaaaggcagttctcgtgcgtaagctctacgagatgcagaaggcgaagcagaaaaagcagatctggctgatctccgatcgtacaacacgcggagatgataacggcgaagtgatgttccgctatctctgcgccaatccggaccctacggtggagccgtactttgtagtcaacaaggatacacaggattatgtggaaatgaagaagcttggaaaggttgtggagcctttctcctggaagcataagcttctgttcctgctgaatgaattttcactgtcctcccaggctaacaaaccggtgatcaatccttttggaaagctggagtatctgtaccgcgatatcatctatgacaaaaagctggtatttttacagcatggtgtgaccaaagacaaccagtccaagtggctgaacaaatacaaccgtaatcttttcggatttatcgtcagcacaaagccggaatatgattctgcctttacctatgactatttttatccggaaaaaaatatctggcttacgggaatgccgcgttatgaccgtctggtccatgatgagcgtaagtatgtgacggtgatgcctacctggcgcaaaagcctttcctcaggaaccgatgccagaggggtatggcagcttggaaaagaatttcaggaaagcgaatatttccatttttatgatgatcttctcaacaacgaaagacttctgggagcggcagagaagtacggatataccatctgcttcatgcctcacccaaataccattgacggtctgcatatgttccgtcatgatccacgggtaaaatttatggattcgtcttattcctacaaggacatttttgcccagacagatctgatgatcacggactattcttcggttgcctttgattttgcatatttgagaaaacccatcgtatactcccagtttgacagagacagctttttcagtggcgcgcattcctacacagagggatactttgactatgagagagatggcttcggagaggtggagcatacactggacggaactgtggaccggatcatcgaatatatggcagacggctgtcagatgaaagaggaatatcggaaacgaatggatgagacctttgcatttaatgaccgtaactgttccaaacgagtttatgagaggatcatcgagaatcggtaatatggaggttggattttggaaggaaagcaggcaataaagtttgataaatataattctcaggcgatgaagggcattgccattgttataatgctgttccatcatatgtatctgagtcaagatagatttgaggggctgaatgttgttttcactccgttttcagcagatcggatcatgtatctgtgcagaacatttaagatctgtgtaccgatctatgcatttatttccggatacggactgtatctcagttacagaaaaaataattctacacctggcaagtggacagccaaaagactgataaaaacaatgggagggttctggattatatgggggctttctgttgtgagctcacagctttataacggctatgccgtggccagatatttcggaaacggaaatattgccaaaggtgttagcgcaatggtgctggatttttttggtctggcgaaacttttcggaacttcgactctgaacggaacctggtggtatatgagtgcggcgatcatttttatcatctgcgtgccactgtttatgataaaggaagaatatctggtatttattcttgtggctgttgcagcatttccacggataatttccctggaggttatgggaattacgggtatttatgcatttttaccggtatttctcatgggaatgtgtgtagccaagtatgatctgtttaaccgatggtttaagatatggaatgctggaatgaagcatgttttcaaatttcttctggagcttcttgcggtgtttattttgtataaagcgtacagaactttgccgctgacggtatacagtgagatccactggggtgtgtatccaattgtatttatggcattttgctgcgaatttattaatgtcattccgggagtgcgacagattttattgttcctcggaaaacattccatgaatatatttctgatacatacatttataagaaaatcttcttttgtgtatgtgagtggatattttctgaccaatacactgacgcttctgctggcttcactggcagtgtccatagcgctggaatggctgaaaaaggtaagcggatacaaccgcctgatccagaacatctgtgtgaaaataggataataaagataaaggagaaagacctgccatcgtctgtggcaggtcttgttaaagtatgaaagcaaaaaaaacagtttgtatatattggttgatattagtagtggtttttggatgtattattggtgccagaagtacagagataaaggtcgaggctgctgaaagaacggtacgattttgggataacagtggaaattatcttcagaaatctggcgggaactggtatttgaaagattctaataagcgaaaacttaccggattacgttatttgtcaatcccaaagacagagtttttaaaaacaggattttatatgtttgataaaaacggaaaacttttgagaaagcaatccgtttattatttcgataaaaagacagtttctggtgtccgctttgataaataccacatcacagactccaatggaagaatttcaaagggagagcgtggctttgtaaacatagctgaacagaaggtacggggcaaaaaaattatcgcaggcatttattatgtggaagcgtacggaaaactggctgatcgtggaacagtacgctatataagacagagaagattcggtgggcgtaattttaaaggtggttattattatttctatggaaccggaagaatctgcatgcgtccgtcttttcataaagtgaacaaaacagttcagggaaaaaagtttaacggaatttattattttggcaatgataacggaagaatggtacagaaggcagggtgggtaacctgtgagggccagcaatattatgtagaccaaaatggaaaaatgctggtgaaccggtggaaagatggttattacctgaaatcgaacggaaccattgcgaaaaatatgaaaacaccggatggtcagtatgtggactggcagggaagaaaaagtacaagatcagagtatgctttaagtgcatttaaatcggaattggagagttttgtttctgcctacggtggaaactggtctgtttatataaaagatctgaaaacaggaaatgttgtaaacataaatgatcgggaaatgtatccggcaagtacgatcaaggcatttgtgatggcgtcggtctatgatcagatccgtcagggaaaaatgcaatacagctccggtgtgtacagcttgctgtgggatatgatcaccgtcagtgataatgaatgttataatgaactggtaaggcgtcagggaggcggaagctttgtaggaggaacggctgtagtgaaccaatatcttcgaaagaacggttacaaaaataccggttgtcacagttccctgcatccgtcttcttctgcctggagcagtgatggctggcgtaacacggcatctgcaaaagattgtgggatactcttagaaaaaatctatcgaggtcagtgtgtttctcaacagtattccagagaaatgctaaatcttttactgcatcagacgaaacgatacaaaattccatcaggtcttccgacaggtatagtatgcgcgaacaaaactggtgagacaagctcagttcagcatgatatggcaatcgtctatggaaagaaaacaaattatgtattatgtatattttcagaaggcgcttccgaagatcatttactgtacggaattcgttcgatttcttcaagagtatatcaatatctgaataaataaagatcagccagcagtcataggatcaagaaacttccttaattgggcaaaaataaggagtgatcattgacgtgctggctgattttgtattatcaaagaaatggttgtggaagaattttttacataagcgtttttcttagccctaaatatgccggatatttccggtgttagtagtatcgtatccagtttgaagagctaaaaaccggcggaaaggttcggatgcaatggtttccgctacggcctgaaagccgggggtgctcagatttttggtctgcataaccaggaagagtgattcctggcaaacaggaagaaaatccagctccgggaagcttctcgctacacaggcctcgccaagagctatgtctgcctgtccgccagccactgcagcagccgtggagtgatcggtaacaagctcatttcgatatccggatatggaatccggtgaaatttcggaagacagaagtgtacggtcaagaaggatacgacggctgcttcctttttcgcggttcacaaaaataatatctgcccgtgtaagatcagaaaatccccggatattcttgggattttctttttttacatagaagccgacaggatattgacacagagagatcacagtcagtgggataccgggtataaggctatggatatcttctggtgaggcggatgcacaggcaatgtggactttttcaaaatagagagaatacagtccgttgtaggtgttcatgtgagactgcagaaccggcagattgtccgggtgtgtgggaagctgattcaggagaagatccagagccggagaagcctgtccgctgatgatcagtccactggaatgcagaagataatcccttttcaaaagagaactctccggctggtgatcataagactgagcagaagacgcagaacattccgaacccttaagatactgagacagctgttcctcgctgacccgcagctgtttgccgactttggaggaggaaagctctccgcgtttgatcaggtcatatactgtggattttttgatctttagtttatctgcaacttcctgtgctgtgtagactttattcatcgatacctaccataacattggttgccttaataactgcgtaagcatcagagcctactttcagtccaagttcttccaccgccgcacaggagatggtagcagtgatgatatttccaccaccgatatcgatggaaacgatggaatttacagctccctggttgatgttgatgatttttccttttaactgattacgtgcactgagtttcataagtaagtctcctttttttgaatattgaatgaaccggatcaggcaagttctctgcttccgttgtgcagagcaatgaaccttgtgtgggatttgtctgtatcaggagtgctgtaagccactcatgataagaaacgaagcggatcgtgaacatccgcctggcttgtcaactatgtatttatgatagcacttgcagagaaaaacagcaatgccttatagcttgacaagaaactttcctttcggtaaaattaaacaaaaccattcaaaactaaacaaaactgaacgaaacggaaaaggagagaaacaaaagatgaagaaaaaaatcttagcagcccttaccgcgggaattttaacaacaggccttatgaccggaactgtttttgcggcggacacagaagtgaaaggtgatgagaacctgaagggagaggtttatgcatttattgctgccagcctcagcaattccatggaggagatccagaaggatttcaatgagctttatccgaatgtaacgatctattacagtgcagacagctcaggtacactgcagacacagatcgaggaaggtgcacgctgtgatcttttcttttcagcagcagataaacagatggatgccctcacagaggaaaaactgacaaaggaagacactgttaaggatcttcttgagaacaaagtcgttctgatcagaccaaaggacggagagacaaaggtaacaggattcgagaatatcacagacgctgaaaatatggcgcttgcaggagaggatgttccggtgggacagtacgcccgtgagatctttaacaatcttgggatcatggacgatgtaaacaaaatggagatcaacgagtgcaagaatgtaacggatgtacttgcagcagtcagtgaaggaagcaatgaggttggtgttgtatatgcgacagatgctgcgtctgttactgataaagtagatatcatcgcagaggcgccggcagacagccttaagacgccggttctttatcctgtgggacttatcgaggacaaggaagcatcggaagacgataccagggcagcagaggcttttcttgattatgtagagtctgatgcagcgatcaaggtatttgagggctatggatttacagcatatgaggatgaggattccgaggatgccacagaagcttctgcagacaacacggaggctgaggacagcacagcttccgcagacagcacatccaaatgagtatgatgtagaaaaccggcaggcagtaaatattgaaacacagtaaatgccggcacaggaatgaaatatgacagaatttttgagagaaataaactggagtcctctgtggatttccttaaaaacaggtctggcagccacagtgatcgctttttttctgggaatattttgcgcccggaagatcatgaagctgaagccgggagccagagcagtactggacgggatccttactcttccgctggtacttcctcctacagtggctggattttttctgctactgatcttcagtctgaaaaggcccttcggaagctttcttctggataattttgatattaagatcgtgcagacctggaagggctgtgtggtcgcagcggcagtgatcgcatttccgctgatgtaccgcaatgcttgggctgcttttgaacaggtggatataaatcttatccatgcaggccagactctggggatgagcgacagccggatattctggcgggtagtcatgccggcggcaggaccggggatcgcatccggaacagtgctggcatttgcacgtgcgatcggagaatatggcgcaacctccatgcttgccggaaatatccttggaaaaaccagaacagtttctgttgccattgcatcagagacagcagccggaaattacggaactgcaggattctgggtcgttgtgatcgtgctgatctcctttgtgatcgtagcgctgatcaatatcgtatccggaaaaggtatgaaaacaagaaggtggatctgatggcagtcaaagtaaatatcgaaaaaaacttccgtgatttttccctgaaggtggattttgaaggcagttcggcagccattgggcttcttggcgcttccggcagcggaaaaagcatgaccttacgctgtattgcagggatcgaaacaccggataagggaaggatcgtcatcaatggaaaaacagtgtttgattctgaagcagggatcgatctgaagcctcagaagcgtcggatcggatatctgtttcagaattatgcgctgttcccaaccatgacagtggaacagaacatccgctgcggttatcgtggggaaaaatcctccgccagagaaaaagtggcagatctgatccggcgatatcatctggaggggctggagaagcgcctgccctcacagctttccggcggacagcagcagagagtggcactggccagaatgatgatcggagagccggaagctattcttctggatgagccgttttccgcactagacggttacctgaaggatgtgctccagcgggagatgcaggatttcctcaaggactatccgggagatatgatccttgtgacacacagcagagatgaggcctataaattctgcagggagctttccattgtacatgaaggcaggatccttgtgaccggggagacaaagcagctgtttgagagaccgggacttctggaggcagcaaagcttaccggctgtaagaatttttccagagcggagaggctgggacctcacgagatctatgcggcggactggaaaatgaagctccataccgaagaaaatgtagatgaggacattacttacgtagggatccgcggccactggatccgcccggaatcagagccgggtgagaactgtatggcagtgcaggtagaccaatacatagaaactacatttgaacatcagtatatgatccggaacaaagcggaagagaatgctgccggattatggtggatgcgtcccaaaaacagctttacggaggatccgggtaaagatcttccggaatatctgtatcttccaccggagcatctgatgctgctgaaataaagaaaaccccggaaacagacattatctgctgtttccgggattttttgtgcacctgcatttttgatggatttttgcggacaggagctattttccgtgatttccggaataggtgatgtaatcggacaccatcatggcaagcttgaaggccagtgcatcctcaaaggtacggatatccaggccaaaccgcttctgcagcttttcaaaacggtacaccagagtattccggtgcacatagagctgtctggaggtttcagaaaggttcaggttattttcaaagaaggtccggatgatattgagggtttcgtcgtcaatagattccagggattcttctccgaagatctcgcctacaaacatgttgcagacctgagtgggcagctgatagatcagacggccaatgcccagacggttataaccgaaaacatttttgtcagcataaaagatcttgccgacctccagagcagtgcgggcttccttgtaggcatcggaaagctccatgatatcatctgcaacattgctgtaggaaacccaggcagaggtcatggcctctgtattgagcatatccaccagcatgcaggcgataccctccagttcttcgtagctttcggtgctctgaagctcacgtactacgatgatgccggaatcatccagtgcagtgataaaatcccgtgtacgggcagaaaagatgttgcggatggtagccagggcattttcgtccttgtgctgcttggtttccacaagaaataccgcacggcgggcggaaggtgtaatatgaagacgggcagccttgttaaaagcttctacctgggaataacggtccaggagaagattttgcataaaggagttcttgtctgttttttccgtataggcagtgaggagactttctacctggcagacagcaagctctccgatggtagaagcctgctctccggagccccatacgatcagaagcatattgctctgaggtatgttgttcagcttgtacagactgcagctgcggttggagatgcataaggcaggatcctcccggaactgagcaagcttttcagaagaaggaagtcgacggtcccctgtggaaatgtatatctggtcattttcatccagaatacagaaatcaagaccgctgatccggttccagtcatccagacatttttgaattgtttgctgtattttcataaaaagcgtcctttctgatgtgaaataaaactagtgaaataaaaagaaaccccgggaaatcatatccccggggttacattctgtttttatgattcgacgagaattagtttgtgatagtaagctctgtctctttgtcgaagaagtgagctttctccatatcgaatgcaaatctgatcggatcaccggtcttagctgttgtacgaggatcaactcgtgctgtaacctgagttccgtcaacatcgaagtacaggaatacttcagcaccaagaagctcgtaaactttaactacggagttcattggtttgcttggagatgtctcaaggaacatctgagaatcatggatatcctcaggacggataccaagaacaactttctttccaacatagcctttgtctttcaggactttagctttagctgccggaacgataacctcatgctcaccaccgatcgtagcaattacattgccgcctttttcggagataacagcatcaaggaagttcatctgcggagatcccatgaatcctgcaacgaagaggttgcctggtttctgatacaggttctgtggtgtatcaacctgctgaacaacaccgtctttcataacaacgattctggtaccaagtgtcatagcctctgtctggtcatgtgttacatagatgatagtagcaccaagtctctgatggatcttggagatctcgatacgcatctgtacacgaagcttagcatccaggttggaaagaggctcatccataaggaataccttaggattacgaacgatagcacgtcccatagcaactcgctgtctctgaccaccggaaagagccttcggtttacgatcaagaagcttgtcaaggtcaaggattcttgctgcttcacgaacagccttgtcgatctggtccttcggaactttacgaagtttaagtccgaatgccatgttatcataaactgtcatatgaggatacagagcgtagttctggaataccattgcgatatcacggtccttaggctcaacatcgttcatgactttgtcaccgatcttaagtgtaccaccgctgatctcctcaagacctgcgatcatacgaagtgttgtagattttccacatccggatggtcctacgaagatgatgaattctttgtcttcgatctccaggttgaaatctttaactgcctggaagccattcggataagttttattaatgtgagataatgataaacttgccattgttgtttccctccaaaattaatatattgttttacgtaatttcctttgctggttaacagtatatcgaaaatgagagaaaagggctagagctgaatcttacaaagtttccggcagtttcttgtcattctgacgaaaaaacgaaaggggatttttcgtcattttgtcaaaacgacggtttcctatgtacaggttcacgaaacattatacggtattcaggcagaatcctcaatatgtaaaaaaagttcaaacgagttatttacaactaacctaagttggagtatactaacttattagataaaagaaaagttttctcaataaaggagggatcagaatgcatattgcagaagccgaaacagaagagaaaaaaacaggatgctaccgacatacagagatgcagagggatcttattatagagaaactgaaggagaaggggctccgcatcaccagacagagaaagattcttctggacattatcctggagggagagtgctcctgttgtaaggaaatctattacagggcttccgcactggatccgaagatcggtgtagctacagtataccgtatggtcaatacgctggaatccatcggtgctatcagccgaaagaatatgtatcgcgtggcatgcagcacaaaaggcgcctgcacagtagaactggatgatgatacgatatgccatctgtccggacagaagcttaatgaagtgatccttgcaggacttcgggcctgtggggagatcagtgaacagaatatccgtaccctggcgctgctgcctgttcatgaggtcgggtgagtatggaaaagctatggcacaatataataggaaagaagaggtttgtacagactaagaattagacagatcaaactattagtaaaaattaactgttaggtaaaaataactgaaaatttaacgaattgtgctgagttcacacaaaaaacactggacttttttttacagacattttataatattgaaaatatcggggcggacatgaaaaatcctcaccgggaatcagaaaaaaataaaaatcatatatcaggaggaaattattatggcagactttaaattcaaaaaatcaggactttttgcagcaggcgttcttttcggaacagcaggaatcaagatcctcacaagcaaggatgcgaagaagctttacacaggatgcacagcagccgttttaagagctaaggactgcatcatgaaaacagctacgaatcttcaggagaatgcggaagatatttatgctgaagctaaggagatcaatgaggaaagagtagcagctgaagaggctgtagaggatgttgagacagaagcagaggaaactgcagatgaggatgcattcaaagaaacagcagaagagacagaagaagcagcagaagagacagctgagtaaagaggcgattttccgtgaaattttatatcaaacatgagacaagaggccggcttcgtatccatcttgctcagaagaggatgagctacgggcaggcagatacgctgttgtattatctcgagaatcttgatggagtggtttctgccaaggtatacgagagaacctgtgacgcagttgtaaattatcggggcagtagagctgcggttatccgtggtatcagcgaatttcattatcaggatgtagaggttccttcacaggtgctgcagagctcagggagagcactgaatgcagaatatcaggagaagctgatctccaaggtgatctgccattacggaagaaggctttttctgccatatccgctgaatgccatttatacaacagctacttccctgaaatatatctggaagggaatcgatacacttcttcaccgtaagatcgaggtgccggtcctggatgccactgcaattggagtgtctgtattacgtcaggactttggtactgcaggctccatcatgttcctgcttggaatcggagagatcctggaagagtggacgcataagaaatctgtaggtgatcttgcaagaaccatgtccctgaatgttggcagggtatggctgaagagagaggatcaggagatcctggtagagtccggagaggtccagccgggagatgaggttgttgtacgtatgggtaccgtaattccttttgacggaagtgttacagatggagaggctatggtcaaccaggcttctcttaccggtgagtctgtacctgtatgcaagaaagagggcagcgttgcctatgcaggcactgttgtggaggaaggtgagatcaccatccgcgtaaagacggtaggtggttccagccgctatgacaagatcgttaccatgattgaggagtctgagaagctgaaatcttctttggagggaaaggcagagcatctggcagataagctggttccctatactcttggaggaacagcacttacatatctcctcaccagaaatgccaccaaggcccttgcgattctgatggtggatttctcctgcgcgcttaagcttgcaatgccgatctctgtattgtctgcgatccgtgaggccggtacacataaggctacagttaagggcggtaaatatctggaagcaatggctgaggcagataccatcgtatttgataagacaggaactctgacaaaggcgaagccaaccgttgtggatgtggttccttttgacaacaatgatccggaggagatgctgcgtatcgccgcatgtatggaagagcatttcccacactccatggccaaggctgttgtcagtgctgccaggaagaagcatctggcccatgaggagatgcattcaaaggttgaatatgtagtagcgcatggaatttccactacgatcgaagaccataaggccgtgatcggaagctatcactttgtatttgaagatgagaaatgtctgatcccggaggatggcaaggagaaattcgacaatattccggaagagtattcccatctgtatcttgccattgacggacgtcttgcagccgtgatctgtattgaagatcctcttcgtgaggaggcgaaagcttctgtagaagcactgcgtggggcagggatttccaagatcgttatgatgacaggggacagtgagcgtacagcagcagccattgccagacgtgtgggagtggacgaatattattccgaggtacttccggaggataaggccaacttcatcgaaaaagaaaaggcagccggaagaaaggttatcatggtaggtgacggaatcaatgattctccggcactttccgcagccaatgtcggtatcgccatcagtgatggtgctgaaattgcccgggagatcgcagatattactgtaggtgcagatgatcttcaggagcttgttgttctgaaagagatcagcaatgcactgatgaagcgtatcagacgcaattaccgttttattattacctttaacgcaggtcttatcgcctgtggcgttgcaggtatcctgcagccgacttcatccgcacttctgcataatacctccacactggcgatcagcctgaagagtatgcagaatctgcttccatagaaaatttttaaccgaatcaagtaagtcccctgtaggattgcgaatatccgcttgacaataaatataaaaagccggccaggttatcgaagagataagagcttcgtacctggccggcttttttaggctgctcagacgtggatcgcaggtatcagcctgaaggtgtaggtgtatgaagtaagttttattcctgaggaaagggttcgctttccaacgtcagtccgttagtcatatgatagcgtttcttttgggtatccgaacggagaggccgggtatgaaggcttcggtacctggaggggctcatatgataaaatttttcgaaggtatgtgcaaaatgctgccggctgttgtatccggaagaaaaggcaatatccgtaatgtgcagagtactgttgcacagaagaaaggcggcctgttccatacgcttgcggttgatataggtattgatggtgcagccgtttttttctgtaaagagcgcctgcaggtaggatttgttgatccctgcatatgcggagatggcaggaatatcaatgtcttccagataatgctcgtcaatatagcggagcgcttttttcagatagacgattccctgggtgctccggctggagcgggcgcagaatgcaagctctgtaagcatacggctgaaaagaagaaagaagagaaattcttccttttgtatctgaacggaattttgttgtaaaaaggtgagcagatccttcaggctgtatccgaagctgcgggaatccgcgccggagcagaagccctgggaggattccgtaaaattccagaactgggaaaatccgggatcctttttcaggagaagctccagagcaaccggacttttttcgagagtaagggaaaattccagattcaggatcgagcagggaaaaccatccggaatctccagcctgtgaggtacatccggccggataaagataaattgcccggatttcagtgggaattccgtgtcctgtgtgccatccaggcagaaaacccggcaggaaccggaggtgatatacatgatctcatagctggaatgtgtgtgatgctccatatgataataaggcagggagagagcataaaaagcagaaatatggaaatatcgggaagagtcttggaaaatatctggcatgaaaaaacctcctgagtatactgcgaagcggaatgtaaatatttcagctgtaaattgcgagtcggacagatgcagatattcgattaaatcgccctacatgtctgactgactgtactctttactgtcagcaaacagtatatcacgcaaaaataaatacgacaatatattgcatttttacattcaggggatgatacctgtcacattataaaaaaacagatattatactgtgatcagaatcagaaaaacggagggtattttctatgagctataaaaatgaaaacatgaaaatgatcgaattacatgagaatggcctggatatccagtttcgtatccgggaaaacggcgtggtagagctggcagatttttcttcacaggaagtaaaaaaagcagtcatggagccgaaggaggatatctgttatccggctgttgagatccacagaagcggcacaggaagcttaaacatgcatgcctacaaaaacaacatcaatcagtcctctgtggattttgtttatgagaaccatgagctgaaggcacaggccggcggaaaagagctggagatcgtaatgatttccccggaaaagctgaaggcagtatatcatatgcgcctgtttgacggagtgccggcagtacagacctggacagagatcatcaacgagggaagcgaggatcaggggctgacctatgtttcttcttttatgtatcagggaatctccagaggcggcgaaaagccttattataaaaaaacagatatctatgtgccgtttaacagctggtgctgtgaggcacagtggcagaaatacgatgcagaaacgctgaatttaaacggaatggtcgtagatggcttcaatcatcagggatatggcctgaaccgttattgttacagtggaaagggcacctggtctacctgtgagtatcttcccatgggaattgccgaggacagagaaacaggggagacgtatattttccagattgaaagctccggacagtggctggcagaatatggctctgcacagggcggaaatctgtatcttgccttaagcggcgccacagagcaggagcatggctggtataagaatctgaaaccgggagaaagctttacaaccgttccggcaggggcagctgttgtaaaaggtggcctgaatccggcagcagcggcactgaccagatatcggagaaaagtacgcagaccgaatacggacgatgagaagctgaacgtggtatttaatgattacatgaattgcctgatgggagaccctacaacggagcgggagctttccatcattgacaaggcagcagagctcggatgcgaatattactgcctggatgcaggctggtatgacgacggattctggtgggaccgtgtcggggaatggaaagaagcatccggaagattccccaatggtctgaaagaagtctgcgatcatgcacacagtaaaggcctgaaaatgggactctggctggaaatcgaggttatgggagttgcctgcgaactggcaaacaagcttccggatgactggtttgtctgccgtcatggaaaacgccacattgacaataaacgctatatgctggatttccgcaatccggaggtacggaaatattgccgtgatgtagtagacaggctgatcaatgattacggtgtagagtactttaaagtggactataacgtaaccatgggatatggaagtgatctgaacagtgacagctgtgcagatgccatccgtgagcattatgaatgtcttcaccagtggtatgaggaaatcttccgggatcatccggagcttgttgtggagaactgcggttccggcggacagcgtatggattatggtatgctgaagatcttaagcctgcagtctaccagtgatcagacagattatctctacaatgccaatatcgctgccaatgtagccagtgcggtaactccggagcagggtggtatgtgggtatatccgtatgaggatgaagaagagcatgtgatctacaatgtagtaaatggtatgcttctccgcccatatatcagcggtatggtatggaagctgggcgaaaattccatgaaccgtatgaaggagggaatctccctgtataaggagatccgtgaggaagtccgtgacggcgtgccgttcttcccgcttggttttggaaatctgaaatctgaagttcttgcttacggagtgaaagcagagaagaatacctatctttcggtatggacaccgggaacaacagaagcagtgatcccgctggaaaatgcagagcaggtccgcagagtatccgtgatctatccgaaggaagagatgtgcggatataagatcgaaaatggaaatcttgtagtgaagatgccacaggaaaaagcggccagactgtttaagatcgagatgaaatagaaaagcgtgaaagaccgtaagtttgacgaagaggcgtgggcaaaaataaatggaaaataaaagagcgccggcatttttaccagaaagctcatcagtctggatgaagttgtaaagatcccggctgtgtacctgaattataagaaatacagatgggtgaaggatctgacagtgaaaagcgaatagaaacagaaaacagcagagctgtatgtcccgggattacagggaatatacaattctgctgttttattttatgagattatctgttttccgcaagatattcttctgtaagagcaaccgcatcggtgatacactgcgggcagctgcagagaaccttgcctgtctccacaccttttaattcacggcagatacaggaaccgtttttttctttgaatttctggatataggtgcggagctttttgtaagtgtcacctttggagccggaaccttcttcggtatttccgcggctgttggaaagtccgatgatcatagccataccggaaagagcaccgcacatttccataacacccattccaaggccgaagccctcggcaatacggaacatctcgttttcatcgatgccaaattcctggcagaaagaacaggcaactgcttgtgcacagttacagccattctcgtgtaattttgtagcgtgttcagcttttgtactcatgatttcttatcctcctgatttcagatcgcaagcatatttttgatcgcttccatatagatcaggactgcttcttccataccggagaccaggataaactcatcggctccgtggatgcggtagtcaattccctctttttcaggtccgaaggctatgatgtttttgagggattttgcgtaagtgccgcctccgatgaccattggtttgtgttcggtatcgccggtcacatctgtgtaagctttgtaaagagcatttaccagcggagattctcttgggaagaataacggagcaacaacctttatgatctcaatacgaccgtttttatcttccagtctgtcctggcacattttgcggatatcggtctcattaagagttaccggaacacggatatcgatggtacaggaaatgacaccgttttctgtttttacgattccgttgcataacgtcagatcgccgtattcatctgcaaatttcagaccaatgccggagccgtcacatgcagtgccgatatgggagttatagaattccacaaagtcatcttcaaagcctgcttttgccagacattcaaaggttactcctgcagcattgacaccgagatggggagtgctggcatgagccggaatacctttggcgtagatggtgagctcaccattttcttcggttaccttatattcctggagcttcgtccgggaaagtgcggattccagcttttccttcagaccgtcctcatcgggaacaatggttgtacaggtgtcacacattgcattggatacaaaaccgccgttcatggagatgatccgggtgttttttgagcaggcgatcatggcaagctgacctttttcaccgtggatacatgggaagctggcatccggtgtgaaaccgcaggaaagttcttctgctacctgattgtagtgatccatacatttggaacctgtttcctcgttgcagcccatgatcaggcggactcttttgttcagcttcacgccgtggtcgcggagaagcttcatggcatagagcgcttccaggatagggcctttgtcatcagtggtcccgcggccgtatacatgatcgtcttcacgggtaaggcggaacggatcgtaggtccagtctccgcctacaggaacgatatccagatgaccggcgatgccgacgatctcatcgccctcacccatttcggcataaccgcagtagttatccaggtttacggtttcaaagccaagttcttcggcaatcttcagtccctctttcagggcttttgcaggaccctcaccaaatggttttccctcggaaggggtaccgagctgggagtcaatggcaaccagtctgccaagatttgtgagcatttcttctgataatgcgtggatttcctctttaatatccatattgatttcctcctgtttacagcgttccggaaagtgacaggatggaacgctgatgttatgagctctattatagcatagattgtaatgaatggcagagtagatttttacctgttgaagacgtaccgatccattcggcggaaggcttcttctatgcgggaacggggtgaggccagattcattctcaggtggcagggaccgaaaaacatcctgccgtcctggacggcaacgccgacatcccagcaggctttttccacatcttcgattgttttgccatgggcagcacaccagtcggtgcagtcgacaaagagcatataggtgccttccggcctggaaacgttgacacccttaaagtgccggtcaatgtaatcacaggcaaagtttacatttccgctcagtacttcgcatagttcatcggtccattcatagccttcaggctgataagcgccaagcagagcgtgcatggacagaacattcatcatattataatggctcagactggactccttcaaaatacgatcccgccaccagctgttgtatacaatgtgatagctgccaacaagtcctgccagattaaaggttttggatggagcgtagaaggccgctgtacgctggcgggcatcttcgctgacggactggctggggatatgcttatggccattcaggatgaggtcagaccagatctcgtctgagatgacgtagacatcatattttcggtacagctccatggctttttccagctcccggcgttcccacacgcgtccgcagggattgtgtggattgcagagaatggcagcgtggatcttcttttcacggagttgtttttccatgtctgcataatccattctccatatgccgttttcatcccttaccagcggagaatgtacggcctcgtagccgttgtttttcaggcttgaggtgaagcctatgtatgtcgggctgtggaccaagacgttatcaccgcgggagcagatgcagttcagtgcactgataactccgcccagaacgccattttcgtagccaatgtgcctgggcttcagaccggtgacaccgtggcgtgtttcctgccagcggatgatggctttataatattccggcggggcttcgaagtaaccgaaggccgggtgactggcccgttcgatgatcgcctgctgtatggtaggtacagtaggaaagttcatgtctgctacccacatcgggatggcatcgaagccctccttcggcggggcaggagagaaaccatcgcccttcaggccgtctactgcgatggaatctctgccatgtcggtcaatgatggaagtgaagtcgtatttcatatgaatgctccgttactgaaaacttataaaaagttataaacttctatgtttcattcctacttcaacgagtatgcttttgatgatataaatatctatctactcacaagttcttgtactctccataggcgtaaattccggattaacgtacccgtacatatttgcactaacgttttagtgttagcttgcaaatctttctccataagccttgagatttatagatgcctgaaaatctctatcaatgacatttccacaatcacatttataaattctgtcagataatttcaagtcttttttaatgtttccacagcaactgcaaagctttgatgatggataaaaccgatcagccacaataagctggatccctttatcgctgcacttgtattcaagctgctttctaaactcaaaaaacccctgattctgaactgcttttgataaatgtctatttttcatcattccactaacattcaaatcttcaatacaaataaatcttggttttcgacttacaatttcagatgtagtctgattcaaatagttcttacggatatttgttaatctgtgatttcgttttaataaaagtttttcctttttgattacattatttgttttgcagtaactttctcctttcttatttttctcgtaagagcgagagatactacgctgtaatctgcgtttctgtttttctagtttctttactttctgacttttattgatgttcttatacttagctccatcagagcaaatagccagatctttgattcctagatctataccaatcccatcatcattaagtttttctatgcaatcaggaaattccacacatacgctgatccaccagttcaacccatcaaaagatattctcggattcatgtatttagcatctgtaggaatacgaccatgctctgcaagtcttacccaatttagtttttgtttatttcttttcctgctcgaagaaaatccttcaaacttaacatgagtattgctgaattgtatcttaatattatcctgatagaacttcggtattgatctcttttttggcttgaatcttgggaatttctgcaaacctttgaaaaagttcttataagcggtgcaggcatctttgatcgcctgtttggttacattatttgaaatactcaataaccatgcgtattcatcagaatgtctaagctttgtaaattcttttctgagttctgcatctgaaatgaattttccgcctttttcatagttttctatttcccttgccaaagcccatttataagcaaatcttgaagcacctgcgtactgaaacatcttagttttctgtatattatttggtattaacattacttttatggcttttaccatctactttctcctgtatcaattcccggataagtttcttggctttattcgctcgttttccttgtaatttgcaactgaatactgtgatcatctgaaccagatcttcaacaagttcctgctgttcggatttttcagtattatcaataatctcaatctcacaattataaagcgaagcgatatattctatcaattcaaaaccaaatcgcaatagccgatctttatataaaacaacaaccttttcaacctgattttgagatattcgcctgatcaattcctggagtcctttttttcttataattaattccggaaccgatatcacttattatctcaaatggctgtccttttgccagaagatatgtcttaacattatcaatctgtcgttccagatcatctttctgtttatggctggaaacgcgacaatatccaattgtaatgcgatttttaggctttacatttattacctggttgagttgctcgtcagaataatatctatagccgtttactgtagtatgatgcggatgaagttttccattggcatcccaatttcgtaatgtctgggcggatacgcatataatttttgaaaattcatgtatagaataatatttactcaaagcatcaactcctttcaataatattccactctaatatcttataaaactcaacatgtacttatatgatcttataattttataatttatatttaactgttaataacctcctgaaaaattctatttgcttcaccttatcatattttgggggtggcgtacatatattaatgtaaattatgagacgatttgattttgcgtaattgagtggatgggttgaatagtgcgaataatctataaaagaagtggcggaaataccagcaatgatatttccgccgttttacaactccgaatatcctatccagagctactttgtgatcatagtatatgttataaaatcaaattttatgaaatgtaaaaaggaactcgtccagagcccctttcctttgaataagtaataatatctttctcactccggaaaaagacttctttgtacttatataatactggttcaattactccttgtcaatatttatttttatctttgtaatgtgttctgtcaaagaaatatcatctgacaattcaagaattttccttagttcagcaagttcgtcctgtgccttattacgttcttcttttatttttgaaatatattgcaatttatcatccattgaggtggtaaatttcgttgcaatcacgcaccctatgggttaaaagagatgcaggagccgcgacgcctgcatctctttcatctataaatgtgatctattgcgaatgaataggttttttattttgcaataaacataagcaggatcaatactttgctaataattttttccagggtttatagcctttcatataagcaaagtcttcttcattttggaagcctgcaatcagttcttttttcatttcttcagcatatggattttctacatcttggaattttatatgtttatacaatcttgatttctgaaaatcacagattgtatcgacattctccagcagttgttttattaccttaaaagtatcttctacattttgttctgccaccacaacattaaacatggttgcacattcattgtattttcccatctcaaaaatacctgctaatgcatacattttctcggccaggaatcttgcggatttatgatctttattgtcaagagcttttgtgatcatcatgccaaaggcaagattcaaagtagtatactctgaaagaattatattttccagtttttcatatgcttcttctgttttttcctgttccatgtataattgcccaagtcttagttttttcatgggatcatagtcggaaaaatagttcagatatttttctgccatttcataattcccttttcgcaagtagaatccgaacagagaatctgccgcatggtgctggattttttcgtccttgtcatttagtgccatttcgtaccaggaattaatctgttcgtcgtacttatcgggatgctcacactgacctatgattcttcgcgagtcaagcatcaccgccacctgccagataagcatgttgcagttagggtaatcttttatgatatttactgcccattgataggtcttttcgtaaccttctgctgaaaacattttgtccatttcctgaataagttctgtaatttcaacgtctgtcagattttcatgaaaagacaacagggtatcaagggaaatatgtagcagtcttgcaattggtgctaacagttcaatatctggattggagttcccgttctcccatttattcaccgctggagtagttactcctaagcggtttgccatttcctcctgggtgaaaccagactcttttctatatttttttatcacatttccaatattcatcctaattctctcctgattgaaatttcaaaagcttttgtgattaaatcatagcaggattggaaattgaacacaattgaattgttgttaaataaaattcatattttttaactgatgggaaagttgatcgtgatcagcagtcggtttttgggcatatcctaacaaaaggaatcatggagactgtgttttacgatactttgtatgtttccctggtcaccaattaattaattatgcatactctaacagaagaagtctgtaaaggagtatctgcatgaaaaataaaaaatggattgcactggcggcagcagttgtgctggcggtgacggcgctgccaatgggagtatttgctgcgaagaaagacagcacagaagagaagcttacaaaggttacactgaatgaagtcgcacattcaatcttttacgcaccgcagtatgtggcgattgaggagggatattttgcggagaaaggtctggatctgacgctggtgacgggattcggagcagataaaacgatgactgctgtgatttccggtgaggcagatattggatttatgggcgcagaggcatctgtttatgcttatcaggagggcgccacggatcctgtcgtaaattttgcacagttaacccagcgtgcggggaattttctagtggcaagagaagagatgcctgatttcaaatgggaggatctaaaaggagagaaggttcttggcggtcgtaagggcggaatgccggaaatggtatttgaatatatactgaagaaaaacggcattgatccgcaaaaggatctgaccatcgaccagagcgttgatttcggttccacagcagcagcttttaccagtgatgattccgcggcatatacagtagaattcgaaccatctgcgaccattctggaaaaagaaggagcgggctatgtagttgcatctctcggagaggcatccggctatgtaccatatacatcctacagtgcaaaagcaagctacatgaaagaaaatcctgagatcatccagaaatttaccgatgcacttcagaagggaatggactatgtgcagagtcatacgccggaggaaatcgcagaagtgatcgcaccgcagttcaaagaaacagatcttgaaaccattactgccattgtaaaacgttattatgaccaggatacctggaaagaaaatcttatttttgaaaaagacagctttgagcttctgcaggatatcctggaagatgcaggtgagctgacggatcgtacagcgtatgaaaatctggtgcagacagagtatgcacagaaagcatgtgaaaattaaaaaatagtttagaaagtttaaaaaacatgggaaaaacctgcggcatttatccaatgcgtcgtaaaaccccttgtttcagctatggggatataagacgcgtccatcgaatttatgcaagtaattgaagatggacaaaatagtaattgtattaactaacaaaccatagtataatataaatatgaacacaacatataaatcaaacaacaatgtcgtctattcctgtaaataccatgtagtatggtgtccaaagtatagacgaaaagtattaattaatggtgtggacgtccggctgaaggagctgctcacagagtatgctgcaaatctttctgtagacattctggaaatggagatcatgccagatcatgttcatatgcttttggaagtagatcctcagtttggcatccacaaagctgtaaagtcatttaaaggctatacgtccagaattttaagacaggaatttccctatcttaaaacgaaaatgccgactctctggacaaacagctattttgtatcgacggtgggcggtgctccgctggaaacagtaaaacagtatattgaaaaccagaaaacatcgcagagacaaaaggataagatgggataatgcaaaaaggaattaaattcaggatctacccgaacagagaacagaaaaacttcatccatcagaccctgggatgctgccggttcatctacaatcggggacttgccatgcgtaaggaaggctatgaaaatggggaaaagatcggctattcccagacttccgccatgctgactgaactgaaaaagcaagaggagtttgcctttctgaaagattcctataaccgcgagaagcagcggatcagggtggcaagagtgtatgagaaagtaaccaatcagcggaatgatttcctgcagaaacagtcaacgatgctggtgcgtgaaaactaaaccatctgtattgaagatctgaatgttaaggggatgatccggaatcataaactgtcaaaatcgatagcgagtgtttcctgggcaaaattttttgaaatgctggaatataaagctggctggtatggaaatgaaattcacagagtaccaacgatgtatccgagcagtcagacctgcagctgttgtggctacagaaatccacggataaaaaatctgggcattcgtatctgggagtgtcccaaatgccatgcggttcatgaccgggatacgaatgcaagtatcaatattctgaaaaaaggactgcagatgcagtctgcataaagataaaaactgtaccgtagggcatacgggaacagtataaatatagcttgtggacactgtgtaagacattgcagtaccgtaaggtgtttgccaatgcagtagtgggagaagcaagaatccccctgctttagctgtggggagtgtcaaatcgttttccacctgtaagatcattccggggaagacggtcaaataaaatgaaaatacagatgaggagaaaataaaatgttattttttgtaaatgattattgcgagggagcgcatccggcgatcctccagaagcttctggaaaccaatatggagaagctttccggctatggcacggacaaatactgtgattctgccaaggagaagatccgtaaagcctgtggctgcccggatgcagaggtgtttttcctggtgggaggaacccagaccaatgccacggtcataggttctgtcctgaaccgttatgaaggtgttcttgcggcgcagaccggacacgtaagctgtcatgaggccggagcaatcgagtatacaggacataaggtactgacacttccggcagaaaacggaaagatcaaagcagaaagtatcacagattatgtggaaactttttatggggatgaaagtcacgaccatatggtatttccgggaatggtttatatttctcatccgacagagtacggaacactttatacgaagaaagagctggaggaaatttccgaggtatgccataaatacgagcttccactgtttctggacggagcaagacttggctacggtctggtaagtccggaagcagatgtgacacttgaggatatcgccagatgtacagatgtgttctacatcggcggaaccaaggtaggagcactctgcggtgaggcagtggtctttacgaaaaaagctccgaagcactttatgactatggtgaagcagcagggagcccttctggcaaaaggccgtcttctgggaatccagtttgacacactgtttaccgatgatctgtatacaagaatcagcaaaaatgctattgaaacagctatgaagctgaaaagagcccttcaggaaaaaggatatcagctttttctggattctcccacgaaccagcagtttgtagttttggaaaataaaaagaaagaagaactgggcaaagaagttcagtttgatttctgggaaaaatatgataaagatcatacagtgatccgttttgccacaagctggggaacaaaaatggaagatattgacgcgctgatcgagttgctgtagggctgtcggcagacgataaaagagatgagatggaaaaactccgtgaggtccgggtgaatgcagacctcacggagtttttgttttcgaaaattataacttcttacccttctcagcagctgcggtaagcgcttcgaatacggcactgcggaagccgctcttttccagggtgcggacaccttcaatggtagttcctgccggtgagcagaccatgtctttcaggtctcccgggtgtctgccggtttccagaaccatttttgcgctgccgagaacagtctgggaagcaaatttataagcctgcttacgaggcattccctggctgacagcggcatctgccatggcttcgataaacataaacacataagccggtgaacagccgcctacagcgcctgcggcgtccatcagacgctccggtaccacttcggtacagccaaagctgtctgtgatcttaaggatttctgccagttcgtcttccgaaacccggtcattggtacatacagcagtcattccggccccaacctgtgcaggagtattaggcataaaacggacaactttcagaggaagaccggctttttcttccagccatgcaagagtcttgccgggagcgattccgatgatggtgtgctctgtcgtgagactgtcgtggacctctgtgagaacttcctcataaaactgcggctttactgcaagaacgacagtttttgcagatctgactatttcattgttatccagagtggtgacaacaccaagagttttttcactgcgcgctctgccttcgtctgtaaggttggaaacaatgatctcgtcctttgaaaagatcccctgacggagaataccgccgatcatggcagaggccatatttccacatccgataaatccaatcttcataaacaaaaatcctccttgaaatttataaaaaaggacacgcctgactgcgtgccctctttggcaatgaaagcagataacgggaatcgaacccgcctcctcagcttgggaagctgatgttctaccgatgaactatatctgcctgcattactaattataccacctgaaataagaaatacaagtgcgatttcagattcggtcagctattaatctgccagccctggctcatggtactgttatgatatctggtggaataagttacatcttctccgaaccagtccggcgcagtgtaggcattggcggcttcctctgtaggaaattccacctcagccagaagaactccctcgtattctccgtggaacacatccagttcaataaaaagtccgtttttttccggaatcacatagcggtccttggtaatgaggataccgtctgctttaggcttcagatgctcataggcttcagcggtgagcggaagattatattcttcacggctcatgagacccttggatttgtaagtaagaaaatagtcatcatcctgccggcggatgcggacgacaggggaagtgcaaagatacccctgctcgatcctgtggcagggataagaagccagatcctgcggaaggtcatccttccggatcagaaatttacgttcgatctccatataaaaaacctccggatttgtgaaatgaaaagatattatgttcagtctacaggaaaaaaacaggatttgcaatggcatatctgttgaaatttcttgacattttcagatgaaaaaagcattatggaagggaatggggaatacagaaaatatttatggattttataaaagaaaggatgaacaggatcatgagtaaagtatatatttttttcgcagatggttttgaagatattgaaggactgaccgtggtagatctgatgagaagagccgggatcgacatccagacagtatctatcaaagagacaaaagagatcagaacctctcatgggatcgatcttcttacagaccgtacctttggagaatgtgatttttccgatgcggatatgcttgtaattccgggaggaatgccgggaacaaaatatctggaggaatataaaccgctgactgagcttctgacagatttctatcagaatggtggcaaggtagcagctatttgtgcggcaccaggtatattcgagagacttggattcctgaaaggcagaaatgctacatcgtacccatctgttatggaacagcttaaaagtgccagaacatctctggagcctgtagtggtagatggaaatgtaactaccagcagaggccttggaacagccatcgatttcagcctttccctgatcggacagctggagggaagcgcaaaggcagaagagatcgctgaatcggtggtgtatgtaagagcatgaaaaaagagatgaaacaggtcctgtgggtagtggcgctttttgttatactgatgacagccacaggaaatttggtgtcagctgccggctttgactggtcggatgatacattcgggaatgcttgcaaaaaagtgtattccgtatctttcaggtcaggcggaggagcctcctctgctatatataaaaaattggaaaagaaacagaaatatggttccatgatcacgattcccaaagtgccgcaggtcccagcaggatatcaggcagaaggatggtctctgaaaaaaggaggagcggaggcaggatataagccgggaaaaaaatattttgtaaaaagaaatgtaacgttttatgcagtgataaaaaagaagaacaatcccaaactgatcctgcacaggaatgacggagatatctacaagatcatccaggctccaagcggaaaactgaaactaccggtgatggccaatgaagagaattatacattccttggatggtctaccagggcaggtcagaagaccgcaccaaggtatgaagccggacaggtgatcacagtcagtgggaccatgcatctctatgcggtgagattctggcggtatcaggaaccgaatctggtcaggaacagctttcattatcctgagaattacgaaaggatcatctttgtgggagattccaggacatatggtcttcagaaggtattgtacgaacagtttggaaaggagtatgtggacatccatgtcagctttgtatgctgttctaatacggaactgggctggctgaagtcaacgggcgcacaggctcttttgaaagaaatagaaaaatatcgtaaaaatgaaaaatacgcaaagatcgcagtggtgtttaatcatggtatcaatgatctcagagatattaacggaaaacaggatctgaatgatagactctcacagtacgtgtcttatatgaaaaagctgggaacaaagctttccatgaaaaactgcagtctgtattatatgtctgtgaatccgatcaatggaggggaaaagggaagtaccaagaatcgtaaatgtgaggatgtccggacttttaacagcggtcttgccggtgagcttggaagtcagtaccactatattgatgtttacagttatctgatgcggaccggatatggtactgtatccaatacgggagacggtacagacgatggtgttcattatacgcctaaaacttataaaaggatttttacattttgtcttaacaacataagaaagacagaaaattactttaacattgaggacgtgggcagctgagaaatgccctgtgggggcatatggaaaacttataagttttaaaattaaatgcgacaagaggcattaaacctctgccgcatttattttttttactcaaaaagcagaatgcggtagagcgtaaaaactcttaccgcattttttatttacaaaggaaaggagaatgagaacgtggcaaggaaatataaaagattgaattatgaagaccggaaagccattgaagcgatgtgcaagcagggaaagcgtgcagaagagatcgcggaagcaatggacgttcacagagccaccatctaccacgaactgaaaagaggtggcgcagaaaacggaaaccggaagcagtacagcgcagacatggcacagaaggcaatataatttgttccccgaaaaggatcggggaagtacatatgaaaggcggaagaatatgaagctgaatattaaaaaatttatgatgacagaaatgggcggagaactggaagaaacgatcaaggcatgggatcaggcactggaagaacgaagaaaagcgacgccgggaattggtgatccagatcagggaataggcttcggatattgggatcgtacatgcaaaagctgccaggatagatgggaagttttcaagttagcaatcagacagttttatggaattgaattcaactttacacggacagatgaatacttcggaatttgtaacgatgatgaaactatctggctgatgaaagagaacagaaaggaggaacgacagtgacaaagaaaagatcgactgacatccggacatgtcccgtgtgcgggcatccggtgcaacgaagtgacatgcagttcacacgggattgcaatgggatcccgttcagactggtttgctgggactgctacgatcaactaatggcgaaaggctatgacggggaatattacacagaagcagatgaaaatattgattatgactattaagaaggtgaagaaatgtacattttatcgcaggacaaaacgcggatttataacatgtctggtcacatagaagggatcggatatgaagaatcaaaagactacaaacaaagaaagagtgaaaacatcaggcatacgattcaggtatttgatggatgcgcagaggagatcgcggagttcaaaacgaaagaagattgtatgttggtgatatatgcgatctttaaagggatggaacaggatagcaaagcagtagagattccgacacaggaagaaatggaaaaacagaaagatctgatcaaacagcttgcggaagcagggcaggaagtggcagcaggcatcgaagatcttctgaaagaaatgttcaacggagagtgaagccgaaacggggcgcaagccccgtccggtcacgatggcaacgtgatcgctgacgatggcaagctgatagccgtccgatgaacactgtggaaaaatagcggcgggcatagactgccagaattctatgcggatgtccaacaggttttcagatgctttttaatgcgaaaagcaacaacgcagcgtcagatgttgccggaagggatgtggtgatatatatgactgcgctgatcagcgcagattgattatgccggaaggcggtacatagaaaggaaaatgaacagatgacagcaacagaagaaagaccagtgcagattttggaactattcggaggaataggaagcccgcgatgtgcattgcgaaatctaaagataccaacaaaagcgatcgactacgttgaaattgatgaaaaagcagtccgatcttataacaatatgtttagtgaagaactgccatataaaacacagtctgtcgtggggtggaacctgaagccggatattttgatacatggaagtccgtgtcaagatttcagtatagccggacatcaaagaggggcggacgaaggaagcgaaacaagatcaagtttaatgtgggaaacgattcacattattgaccagatgggggaatggaaaccgaaatatgtgatctgggaaaatgtgaaaaatgtgacatcgaaacatatgattgcgaattttgtgcgttatcaaaaagagatggaacgaatgggctatacaaataattacgatgttttagatgcaagagaattcgggctgccgcaagcacgcgaaagagtgtttacaatcagctgcctgaatggtgaaaaatttgatttcacaagtctgatcaggacgcctatgcgtaagatcagcgattttttggaagataacgaaaatgttccagaagtatataacgtcacacagccatctgtatataacgtgatcggcgcgtcagggataaaaagggcgacggtgatcaaagattttgcctacacgattacaacacggcaggatagaacaccagcacaggtgattgattgtggatcaggacgatacagatatttgacagaacgggaatgctggcggctgatgggatatacagacgaagaatttgaagcagcaaaagctgtacatgagagaaaaggaagatattacatgacactgtataaacaggcggggaatagcatagcggttccgatatttgaaagcatcttccgaaagataattctgggagaggagaagagaaagaaggatgacagtgaacgtcaggaaggcgatgcaggacgttagaaaagcagggtaatataaaagccatctggtatgcttggcggcaccagaaggcttcacagtggcttcaggacgatgcccgaaaaccatagtacacatcaaagatattgtacaccggacagcctgaaaagtcaatgaatccgcgcttttctgaacttcctaaaacgaccttgtaatggatactaacaattcaactaaaggaagtaaagggaatgagaaagaaaagaaggaaggctgtatatgtcccttatgactatgaagcagcgtataagaatagtttggataagatggaggaagcaaacgaagaaaggatcctgaaggaaggcaaggtgaaaagcatctatgcaacgaaggagattcgatcaggtgatcagctggaagtggaaatctatccagagtttacaaagggacagaaagatcagatcccggatgaagggaaaagaaaaaggcaaagacaggcacagaagaatctgaatgataaaaacagtaaaaagatgtgcgaaagggtgatcagtgagaacttcacggatagagatatatgggcgacattcacatacacggatgacaatatgcctgcttcgatggaagtggcaacgaagaacatgcagaactatatcaggcgactgaattaccagcggaagaagcagggattgagtaatgcaagatatgtgtatgtcacagaatgcagtgaaaaaggacgctggcatcatcacatcgttatggatggcgatgtggatatggacacggttgaagcagtctggaatcttggaaaaagaaatgagatcagaaggcttcagagggatgaaaacggtctggtcggaatggcaaggtacatcacgaaagagaaaagcaaaaaaggaaagtatcaaaagacatggtgtgcatcaaagggactgcggaaaccgaaagaaaaagtcaatcattacaaaacgaaacagaaggatgtggacaggatcgtaaaaggagatctgaatgtctgcgatcatttgatgaaatggtatggcgataaatatgattttgctgaagcagaagtgaaatataacacgttcaacggcaggttctacatatacgggcggatgcggttgaggaaaggaacggcacatgacaagggcaagaagtaggagaacagcacgaagaaagatcaaaagactgatcaggaagactttgaagatcgtatgtgctgtatgggatttcattgcaaggcatccggcaatgcttgcgatgccgctgatcatttttctgctggtgctgacaatacaaatgcacgaatttgaaaagcaggtgcaggcgtgggatcaggagatccggcagcagcaggagcagatcgaagaattgtatgatcggcaggatccagtggagcagacagacatgacggatgtatatggatgcaaaagtctgtacggtacatatgattttccgtggaatacaatgtcgcaggactgggggagcgatcaagtgacaggattttattatcatgaaatatctgaagaatgcaaggcagcaggcggagagttgccgacgatcattcaggtatatacatacattgtatgcgaacagaatggcgtcgattatgaaatggtttttgcattgatcgaacaggaatcccgatgcagatgggacgctgaaggcgacaatggaacgtcaatcggtttgatgcaggtgtcggaaaaatggcatatgcaaaggatggaagaactgggagtgtatgacttgaagaatccatatcagaatgtgctggttggcgtgaattatctgtcagaaatccagaacgatcttcgcggaacagtaccagatgaagatcttccgtactatacgctggcagtttataactacgggaagcagggcgcaaaagcgaatctgtgggatcagggcgttgtgaagtatacatacaacacaaagattatggatcgagcgcaacagctgaaagaagagaaaaagaaagcagaggaggggcgcggatgatcaggaacatcacgaagaagatcagacacatgatccatatgatcaggatccagcaatgtcatcactgctgcctgttctgcaaatattggaacatatgcaaggaggaagaagagtgaatcgaagatacgcaagaagaagcgaggatacagagcaaatgagcgtcatggactgggcgcgatggaaccagaacgcgcatccggaactggaactgctgcatcattgcccgaatggggggagccgcaacaaagcggaagcagtgaaattgaagcagatgggcgtgaaagctgggattccggatctgtgtcttccggttccgatgggaatgtacaacggtttgtacattgaaatgaaatacgataccggaagactggaagacagtcagaagaaaatgctgaaggcactggcggcagcaggacattactgcacagtttgctatggggcagaagaagcgatccgggtgctacaagaatatatcaacctgaagaaaattgatactggaaacagagaagatgcaatgtcagaacagaacctgatgatcagaaagaacgggaaagtgaaatgtattattttcaaagagtagaagaaagatccaaacaggcaaggaaagcactgaagaactgtgaactggcacaaaggcacaaaaaattcggattcaaggaagcaatgatcagcagccgcggagaatgtaccgggtgcagaaatccggatgatgggacgctggatcgaaagtgcaagcgttgcaagtataacgaatactatgaagcgaagtgattatgcttttccttgcggcggctgcatatgcaatcactgcgcgaacaatctatacagcgaagataaaacggcaggagaagcaaagatattttgcgacgcctgcgagtggtgcagatggtatgacggagatacgaagaatccggataagtggaaacaggaatgtgatgaatatatcatcacggaggaacaggcaaaaagaaacagaaaaaaattcaaaattgtgaaataggaggtacacatcatgaaaacaatcgcaattatgaaccagaagggcgggatcggcaaaacaatgacggcggcttcgatcgcttacctgctgggagaagaacaggggaagaaggtgttgctggtcgatgcggatcagcaaggcaatgtatcaatgctgtatgacagatataaaccggaagggatcgggatgtctgaattattggaaagacacagaagcgtcggaggatcttacaagacaacagacctgatccagacaacaccgtatcacaatattgacatcatcacagcaaatggatatttaatgcggactaacatgaatctgctgctgaacgaaaaagaagatcagatccttcgctttgcggctgcaatgctggaagtgcaggacgtatatgattattgcgtggttgattgtgggctgctgctggatatgaccgtgacgaatgttttggtggcgacagatcttgtgatccttccggttaagatcggcggatttgaaattgaagcgattgcgaatatggatgaacagctggaagatctgcgaagcctgaacgaccggatccgcatgaagattttaatgactatgcgacagaagaaccagacaagccttcaggtggaagcatggctgaaagaatcatctggacaggattgcttcgtgacggctgttagaagatccatcattgcggaaaaggcaaccatgcagcgcgtaccgcttccgaagttttctaaaaattgtattgtcacacaggactatcggaatgttgtgacggaactgctgaaagatatggagggatagacatggaaattgatggacaggtaacgatcagcctgaagacatttaatcagcttcaggacagagcaaagcaggcggacgaactgaaaaagaaaatgcaggatctacaagaggagatcacagacattattgatcagatcgacgaatcggaagcggaaccgatatttcgtgaaattgatgataacaatatgacggataaacagatacagaaaaggttcgatgaagcgattgcgaagtttaggatcattctggatccggagaagacaaagcgtttgattcagaagtacatagaaaaagacagaagtgattcacacgcggatgtgaagaacgcaagccggaaggtgctggaacagataacgatcacgataaaagcagaggaggaataaacatggcagcaggatggagcgtaatggatgccttaaataaaaacagcaaggcagcagcagaagagaaaccgaaagcaagattccggacacgggacattagcatccggaagatttacagcaatgacaggaatttttattcgatgccgggaattgaacagctggcacaggaaatcttggcggtcggtttgatggagaatatgacagtagcatatgcgccctgtgaacgcggagaatataagatcatcgccggggaaagaagatggcgtgcattgaatttgttactggaaaagggatatgaagattttgaaacggtgacatgccagatcaaaagcgcagctgaagagaatgaagaaatggtacagctgatcattgcgaatgcgtatcgcgataagacgatcgcggacatgttggaagaggaaaaacgcctgaaggaatcacttcagtacatgaaggataatggattgacgcttcaggggtacaaactggacagcgggcgtctgcgtgacgtgatcgcttcaattatgaacacgaccggaacgaagattgcacagattgaaagtattaacaagcatttgattccggaattttcggcagaactgaaagaaggtcgcctgaccttttcggcagcatatgaaattagcggaatggcagaggacaagcagatggaactgctggaaaagtacaaagaagacgggctgtcattaaaagaagtgaagcaggcaaagaaagagatcgaagaagcagcagaaaaagcagagattccgggacagatgaatttgccggaagatccggaggaatggggaaaggaggaaacggcagaggagcaggaagaagaatggcagcaggcacatccggaaagcattacatcgctttgctattcatgccagcgatattcagaatgcaacgtgaaaacagggacatgtcaggattgtgatcgttatgttgataaagcggaagctgaaaagacgccggaacagcggtatgacgaagaacaggcggcaatcgacagggaaacggcgaaaaagctgactgaaatggagcaggaagaaaagatgcagaacctgccttcggatgaaaagaaagcgcgaatgatgcgagtgtcagcggaattattcaaagacatcaaagaaggaaagatccgccacatgattgtgaaagaggatcaggcaggatacagagaaaaggacattttgacactgcttgcattccgtgatggaagatcaacaggtgaacagatgcgtgtatgcatcacatgcgccgacgatgcacagacatccagtgcgatcattgaaggatatgctgtcatcgggattatggatgtctacgatgcggaagcattgggactgattgacttggaggatgaagactgatggcagatagaaacaaatttgtaaagccagaattgaagaaatacagtgcgaagaagctgttgacacaggatagattgatgaacgctatgatcggaatcagagaaattcagacgaagctgtgggaaacgatgccggatgatcagtacgaaaagctggaaccggaatttgacacagcaatcgctgcaatgatggcgcatatgtgcggggtaatgcccgcacacgcgcagctggatcaagaaaacagtcaagacatcctgatgcctgcgacataggaaaggagaacgacatggaaaagaaattcaatgaagaagcgtacagaaacggatcagaagttgtctgcgatgtctgcggatctgtaattgaacacataaatgtgaaaactagagttattgcaagacaggcggagggcttcaacgtaacagaacagtattttacctgtcaggaatgcggaaagaaatacacagtgctgattgtagaccatgaaatgcagttcctgattcagaaacggcagcaggtagaacgacagatcaaattgcatagacagatccggagcagggcgcagacaatccagcgtttgatcatgaaggatgaaaaaatcaagaagcagcaggaagaaagaatgattatgctgaaggaacaatacaaggaggaagtcggatcatgatgcagatgaacatcgaaagagtgataaatgcaacaggatcgttgctgatctggcttgtgatgatactggcagcagtgattcttgtgggactgatcgtaattgcagtaaatgcaatcggtcagggtattaaagaaatggacaggaaaggggaaaagaaagatgcagataacaacacttccgaaagatgatgtaaaaagaggagaaatctattatataagccggggcggatacaacacagggagcgaacagcaggcagacagaccgggcgtgattgtcagcaatgataaaaataataaaaacagtcagacgctggaagttgtatatttgacaacgcagccgaagaatgaacttccgacacattgcacgatccgatcaacagggcgcgtcagcactgttttgtgtgaacagatccacacagtcgctgtggaacgcattggaaaatacatcggggtgtgtacagcgcaggagatgcagaacatcgacataggactgatgatctcgatcggtttaggcgatgcgggggggggcgacgaaggacaaaacagttgtcactgatcagaaagaagagaaaaaagcagaggagaaaaagacggaagaaaaagtacagacggaaacaaatgaagaactgatcaagacaaggacggaaagagatatattcaaaaagctgtatgaacagatgaccgaaaggctgttagaaaggcgagaatgagcaaaacacagattgtacttgcaacaggggaagtatacgacgttgaagacaaaggagaaagaagaatactaattccagtgggatatataaagcaggaggaagaaaaacatgaacaaagtgattttgatgggacgtttaacacgggatccgcaggtgagatacacacagggacaggatccgatggcgattgtaagatttacgcttgcggtcgatcgaaggggcagaaaacaggaaggtcagcaagatgctgactttccttcttgcgttgcttttggaaaaagtgcggaatttgtggaaaagtatgtgcatcagggaacgaagattgtattgaccgggcggatccagacgggaagctacacaaataaagacaatatcaaagtatacacgacggaagtgatcgcggaagacattgaattcgcagaaagcaaagcgacagcagagggatccggcggagcaggaggacatcaaaaaccggatcagacggaaaatgatggatttatgaatataccggaaggcatcgacgaagaattacctttcaattaggcgaaaaggaaggatgtgacgatatggggctgaaagaagcgtttagaaaagtaggacaggcaatcgaagaaacaaaaatgaagatcggaatgaaaaaatataaaaaaggcggaattcagatcgaagaaaaagaccagaagccggaaatggtaattcctgtaaatgatatttcactaccggaagaaaaaaagaaaacagaagatgcagaaatccgaaaaatcgaagatcttccagcatatgaagacagaaaattctatattgcggctaaaatgcaggttgaaccggaggaagtggaaaaagtgatcagaaaaacagaagcagaatggaatctgtcgccggataaggcagcagaaacattgaaaatgatcagtgatgcagccgtgaagctgaatatgacatttgcggaaatgatggagaatatacggcaggtggctgacaaaatatcagaggttttcaggcgtatacatgaaaataatacgatgacagaaacacagatcagaaaaagagagttatggcggcgatattatgaggagaaaagccggatgtcaaacaatgagcgcagaaggcgagggattccgatggtaaaacgaccaaaacggcagcagtatagaccgccgaaaaagaagacgacaaaaggataataaaggaaggatggtgtggcaaatatggagcaggaaaaggaaaagaatgaagaaaccttcgtgaagaaggtggtgcagacagcactggaagcggaaagacagatccgcaggcagcaggtgctgcacaacacacggatgctgatggaagaatacatcgaaatgaaaagacatattgaaagcgcagtatcagaggaagaagaactaaaggaagaacagtatgatgtattcagaggagaaggcgcacatcttggaagtgttcgcagatcaaaaatgaagacagcgatgatgattgcgaatattgacagagcaatggaagaattgcgggcagaatatgaaacgaaagaaatggtatacaaatacgatgcctttaagatgcattatattgatggggtatcgtatgaagagattgcagacatccagaactgcggaaagaacacaccgtccagatggtcaaaagaattgatcaggaaaatgtcagtgaagttattcgggatagatggcgttgaaaaatattaaaaagaaatcctttttgcttttctttttggggaaaagttggggaaaagctggggttttaatggtgggatgaaagatgtaaactgatagcgtggaaagttgcaagaagcgattgtacagaaatgtgcagtcgcttttttattgccgtttccacgcccttctgaacactgcaacgggcatctgcaaagatgcctgcgtgcagtgcatatatagcacgaaagaaggtggtacatagtgctattacacagatgtaaatgcggggtattgataccgcaggaattacgcctgtgtccggactgtgaagcaaaggaaagcgacaagatgtcaaggcatatggaatacaatctgcgccgaagaaataagaaagcagcggctttctatgtgtcggcagaatggcgcaaagtacgggcgtttgcactgtctttatatgacgacttggacatgtatgcgtactatgttcaacacaagattgttgtggctgacatggtacaccacatcacggagatagaagaagactggacgcagcgtttgaatgtggaaaacctattcccgttaagcaatggaaaccacggtatcatcagtgcgctgtacaagaaggacgaagcaacgaaaagacagacgcaggagctgttgcggaacattatccggcagcactggaaaggggcagggggtatcgaaaaagttttgaccgggctggattagtcgcgccccctctattctgtggagaaaactccccacggaaatttcagatataagggcaaacggtcatgtgtcagattctgacacaatccgcaaggaaaagcagcgggaaaggaggtcgatataatggcaggacaacgacagccgatcgcgctggtacaagcaaaaggaaagaaacatctgacaaaggcagagatcgcagaaagagaacggacggaagtgaaagcaccgtcggacagagtgacgccgccgtcatacctgacagctacgcagaaaaaggcattcagaaaaacggtgaaagaactgcgggcgatcgacctgatttcaaacttggacgtggaagcactggcgcggttagtgatcgcgcaggagaaatacagagaagtgacagaaacgatcgcaaagcagccgctgatggtaactgtggcatatgacacagggaaaaaagatgcagaaggcaatccgatcatggcagaacatgaggttgtgaacagtcaggtggaacgtctggcgatcattcaggacaggtatttcaaacagtgccgacagggtgcagcagattttggactgacagtatcgtcaagatgccgcctgattattccaaaagcaccggaagcaccgaagacaaacaaatttaaagacaagtttgcgtgatgatgcgatgcaggacagaacgacacagtacgctgcggatgtccttgcgggaaaaataattgccggggatctggtaaaacttgcctgcaagcgtcatctggacgacatcgaaaagtcaaaggctgcgccatataaatactattttgatgtggagcaggcggaaagaatcattgaattcgctgaaacattgaccatcgcagaaggcgaagaggaagaacaggtcgaatgttacgcattccagtgttttattctcggaaatctgaacggatggcggacaaaaacaggcggacacagaagattccgaacatcatatgtgcaacttggaagacagaacggtaaatcttttctgaatggaattctggctgcatattacggaaattttgagaagtacaaatacggtcagatatactgcacagcaacgaaaaaagatcagtcgctgatcgtattcaatgaaattgtgaagtttatccggtcagatcctgatctggatgaatgcttctgcgtacacgaacacaacagcacaatagattgtttgctgacacatagcaaaataaaggcactttcaggagatacgaagtcaatcgacggattccgcccgtatcttggaattgttgatgaataccatgcacacaaaaacgaccagatgtacaaacttctggaaggcggaatcaagaagatgaaatctgcgctgatcagtgtgatcacgacagcagggttcgatctgaagtcaccatgttatgcattgtatgaatattgcgtgaaggtgctgaaaggcattgcacacaatgattcgcagttcatatacatcgcacaaatggatgaaacagacgacatgtggacaccgaagaactggatcaaggcgaatccgattctgcaatatgatccggaagcacttgaaaacatggttccgattgctgaaacagcgaaagaaatgggcggatccagtttgcgagatttcattgtgaaacagctgaacatgtggattcaatggacgaatgatgtctatttgaaagacatggaattgtggcaaaatggcgcaacaaagaagacactagaggattttcggggacagaagtgctatgtgggactggatctttctgctggtggagatttgacatcactggcgatcgtatttccgttcttgaaagatgatgtcagaaaatattttgttcatgcacacagtttcataccgaaaagaagggttgaagaacatatcaaaacagaccggacggaatatgacttatggatccgcgacggacttgtaacggtaacagaaacgatgggcggggtaaaaactgactatcggtatattttaacctacttggaaaaaatcatcaccgattatgaactggatgtgcaatttattctttacgatccgcataatgcgtcagctttcctgactgatctggaagcattgggattcgacagcgtggctgtaacacagtcagcaaaggcactgaatgatgcaacggttgatttcaaacttgaaattgaatccggaaatgtggaacacgatggaaacgcgatgatcaaatggtcgatcgcgaatgcaaagacaacttccaacagtttcggagaaatcaagatcgacaaagagtatcagacagaacgaatcgacgtgatagatgcgattattgacgcatggacagctgcaatgaaaggtgaagtgaaacagaatacagcagaatcggtcgaagaatggctgaaactatatgaagcaagcaagaaaaaacaggcgagggggtgatgcaggttgaatgtatggcagaagttcaaaggatggattgcgaaaaaaatgaacttcaccgtggaaacatcgccagcgatgaaggaagaatcatttcttgaatggcttggtgtgaaaagaaaaaacaaggatgtgatggcggaagtaacgtacttcacatgcttgaaaatgatgtctgaaacgctggcaaaaataccgtggaaatattatcaaaaaacagacaaagggatcattgaaccagaactgtcggatgttgcgaaactgctgaaaaacagaccgaatccatttatgacgcccacagctttctggaatgctgtggagatgaaccgaaaccacttcggaaatgcgtatgtatatgtcaggtcgaagttcaaaagaaaaaaatacggcggagaatacaaagtcatggacttgtggatcatgccgtcgaactgcgtgcagatcgtagtggatgatgaaggatacttcggaggaaggggaaagatctggtacgtctacaacgataaatacagcgggcagcaatatgtgttcgggacagatgaagtcctgcatttcaagacatcacacagcttggatggtattacggggcttcctgtgcaggcaatattgaagacaactgtggagggcgcagcggcatcacaggactatctgaacagtttatatgaaagcggactgactgggaaagcaacgctggaatacacaggagatctgaacaaagatttgaaagaaaaactggtgcaggcatttgaagaattcggatcaggtgcaaaaaatgccggaaaaatcattccggttccacttgggatgaaactgacgccgctggatattaaactttcggacagccagttcatcgaattaaagaaatattcagcacttcagattgcagctgcattcggaatcaagccgaatcagatcaatgattatacaaaatcttcgtacagcaacagcgaaatgcagcagttgtcattcctgacagatacgatgctttttgtgttaaagcagtacgaagaagaagtcaattataagttattgacagatgaagaagctttcagcgaaggaaaatattacaaactgaacgaaaaagttttactaagaactgacagcaagacacagatggagattttcgcaacaggtgtccagaacggaattcaaaaagtgaatgaatgccgacgaaaactggatctgatggatgcagaaggcggcgatcagctgatcgtgaacggaaattatattccgatcacagaagttggaaagcagtacgaaaaagcaggaaatgcacagcagcaaagcgtgcttcctatacagctggaaacggatcagaaaacgcagaaggatccggaagaaggagatcgggcagacacgaccggaacagaacctgatgaaaaagaatcgcaggaaggaggggaaaacgatgaagaataaattcaatttttcacggagaaatccaaaaacaaagaagattgaaaatactgggtttatggaattcagaaatgtatcgaataatgcagcggatctgtatatatacggcgacattgtttcttcaacatgggaagcatggtgcgatgaagatacatgcccgcaggacatatcagactttatgaatcagattgaaccgggggcagaactgacggtgtacatcaacagcggcggcggtgatgtatttgccgggatagcgattcacagcattttatcacggcataccggacataaaacaggcatcgtggacggaatggctgcgtcgatcgcatccgtgatcctgatggcttgtgattcgattgtaatgtcatcgggtgcgcagatcatgattcacaaaccgttgtcatgggcgtatggaaatgcggatgattttcagcggctgatcagtgaactggataaatgtcagaaaagcatcacggacatatatatgggacgggtgaaagaaggtgtgacagaagaacaggtcacagatctgatcaatgctgaaacatggatgacggcagaggaagcaaaggaaatcttcgatgtgcagatcgaagaacgtccggcggtcgccgcctgtgttggctggatgatggagaatttcaaaaaagcaccggaaggcattaaaacacaaagcgcagatgatgtgacggcgaagattacagccgaagaagaagcgatcatcgaagaaatggaacttttcggaatctaaggaggaaaacagaatgagcaaagaagcaagggcattgctgaagaagatcaatgacaagaaaaatgcgatcagaggtcttcagggacagggaaaaacacaggaaatgaaggatcagatggcggaacttcgtggaatgcaggaagaattcgacatgctgatggaaatggaagaagacgatgacgatggaatcaaagattctttacacaatgggaaagtgaaggaaattgaagatggtcagaagtctaaaaagtacagcaaagcgcaggtgtgcaaagcatttgtaaacaggatcgtatgtggtcttcgtaaacgtgctatgccggaagaagatcaggagatcatggacagctttaaaaacatgatgaaggaaggcgaagacgaggatggagggtttacggttccggaggatgtaagcacagacatcattgaactgcgccgtacagaaaacgatctggaacagtacgtcaatgttgaaaaagtagcaacaatgagtggatcccgtgtgatcgaggttgatgcagacagtacaccttggggcgatgtggatgaaggcggagaatttgaagaggaagaaacaccgaacctgaaacagatcaagtatgcaatcaagaaaaaggggggaattctgaagacaacacgcgaactgcttcaggatactgctgtgaatatccttgcatacctgaataaatggatcgcaaagaagtcgagagcgacaagaaatgctgcaattttgaatgtgattaacacgatcacaaaaggaaaagaagttgcggttgcgacttttgatgatttcaaagacgtattcaacgtgaagctggatccggcgattgcagtaagttctattgtattgacgaatcaggatggctttaactacatggacaaactgaaggataaggacggcaagtacatcatgcagccggatccgacagatgcaacaaagacacttctttttggcaagtatccggtaaaggttgtgagcaataagacgctgaaaagcacaaatgtattaaaaggcggatcgggatctgacaaaaacgatgtgactggttacaaatatccggtatacatgggagatctgaaggaagctgttaccctgttcgaccgcgagaaaatgacgatcgaactttctactgaagcgggagatctgtgggcgaaggatctgacgggaatcaaggttcgtgacagatttgacgttcagtccgttgatgaaactgcggttgttaaaggcgaaatcagcgttgctgtggctggctaacacaaaaggggcgtgatgatatgagcctaaaggaattgaagcagtatctgcgcgtcgattatacagacgatgacagcatgatcgaactaatgcatgatgctgtcatcgacgaaatgaaggaactgattccgtcattcgatccggaaaagccaacaaataggcagaaaatactaatctgttcatatgtgaaggaattatacgatcacagggatcgaatgtacaacaacgggaaaatcacatctgattcaacggaacgcatcaggtacgcgattcagtcaatgatgctgaaagaaacgttaaggggatagcatggcaacagcaaggatcaaattttataagcgaaacaaaagtctggaaaacggacggcagcaggaaaaagaaccgacactgttttatgaagcatggtgtgagatcagaaacctttacgggcaggaattatatgaagcacttgatgtcagactggaaaatgcaatcgtatttgaagtgagatattgcagacgtataaaagagattaaagcacatgcaaaagatttcttgatcgaatttgaaggcgacagatatgacatttatgcaacggatttcaaacagaatgacaggcagtatgtgcaactgaaagccaacagacgcgactgacaggagaaaacagagatggaaatatcgttccgatttgaaggatttgaagaagtacagcgcggcgtggaagccctgtcgtcaagtgctgaaatcggagcgatcaataaaaaaatatttcagagatccgccgatattacagaaccgaagatgaaggcacacatggcaagatctgctgacaattcaaagtcaggacggaatggatacagaccgccgggacatgcgcgggataacattcctaaaaaggtaacgaccaaaaaaggcgaagtcggatgggaattgaatggcgacgcgcaaaactggttttacatgaagtttgtggagtgggggacatcgaaaatgccgccacgggacttcctgaataatacgaaatcggagtgcgaaagcgaatatcacatgatagctgatcaagagtaccagaaagcattgaacgaaaaactgggaggataaaacagtggatgttattggattggcggcggcagcattgaagccgatttcagatgaaggaacaatcgtacagcaaggatggtatgacgaaagcctgaaacggcttcatgtgacactgtggaagctacaagacacagaagatgcacattcagatgatgaatgtgaaattgaagcagcaagcatacaagtgaatatctggtcacggagcgatcagcaggcacttgtgaaaagaataaaaaaattgatgaaggaaaacggatttctatttcaggaaggaaatgatcagattgaaacagatacggggatctttatcaatgcgatgcgatttttaattttgaaagaagcagaggaaacggaggaataaacatggcagcagaaaaagaaaagatcgtgcgaagcaggactgtatcgttcagagatattcatatcgcaaaagttacaacgaatacagaaacagaatacgcggcagaaacaccgtcaaagctggcacgcgcgatcacaggaaagatcagcgatgaatttgaaactgaaaaaatttacagtgatgattcagttgaagacgtaaatatgtcatacaaagggacaagcgtggaattggaagtgaacagtttggcaccgcaggataagtcgcaggtgttcggacatctgtatgaaaaaggcttcctgatcaagacaaaggatgacaaagcaccggaacttgcgcttggatggcgtgcaaagaagctgaacggtaagtatgaattcaaatggctgtactgtggaagattcggtcagggatttgaagacaattacgaaacagaaggggaaacaaaaacaacgcagacagcaacattgaagggcgatttttatgcccgtcagatggatggaagatatgaatgcagcgttgatgaaagcaatcttcttacggaacatacagaagcggcggcagcgatcaaagactggttttcaaaagttcaggaaaaaccggatgcagcataaaacaggagggaaaagaaatggcagcagctaaaacaaagaaaagatcaattatcatcggcaacaaagaatatacgatgccgcagaagatgtccacgatggcatatttgcgctatctggaagtgcgcgacagcattatggacacagaagcgaaacgggcgttgtacacaagacagcagttcatggatatgatggacgttattgttgaaatgtacggaaaccagttcacaacagatgacatgctggatgctgaaaccggaatgacaccagattcgatcgtgatggaatttgcactgatggatgtgtcagtgggtgaaaaggttgataaaagaacggaagacttcgcgaaaaattttacaaatggcaagtgatgccggaactgattctgccgtgtggacacaaagaatatgtctgcacgacgatttcagtggaaatgtatcgcagatatacggaaatcatggaacggaatgacagtgattcgatcagggatgcttttgaagcgaatacgaagatcttaatggtagtattcggagcaaggcagcgggaggtggaagaagcagatccggaagatgtattgtcagctgtgaaagaaatccatttcatgatgcaggatgtgatcacgaagaaatttctggatcttaatccagaacatcctgaaaagatacagaaagaaaaatctgctttcgacgaatatgacgaagaaaatggatacaacgatgaagatccgggcgaaaacctgtggaagatatgcagggaaaatgtggatcggatagtgaagatctgtatcaatcttatgaaaaactcatatcagcagtgcatggaagcggacatcatgagccttttggatcatgcggcattcgagattaggacggtcgatgagaagtaaagaaaggaacgcgaaacatggctaaaaccttaattgagattagggcagaaacgtcgcagtatcagcaggcgatgcgtcaggcagcagcagaaatgaaaaacctgacggcacagcattcgctggctgcggcacaagcaaagttaagcggatccgcgcaggacgccctgcgtgcaagagtgaccgaactgacatcgaagatagatgttcaaaaggggatcgtgcagcagaatggacagcagtatgacaacttaaaacagaagttggaactgcaaaaaacagcgcacgatcagctgaagacaaaggttgaagcagcaaaaaaagcatatgaagatagtgcgaaagcgacaggcgaagacagcgaagaaacacagaagctgaaggcggaatatgaaaaactgtcttcacagctgtccaccagtgaaagccagatcacaaaaacagaaacagcgatcacgaagcaggaagcggcagtgaatcagtcgaaagctgcgctgactgaaatggaagcggaactgaaaaatgtgaacgcagaacttgcgcgcgcgccgtttgacggatatgcagcaaaagcagaaaaggttggcggcacattaacgagtgtagggcagaaacttcttccgttatcgaccagtatcgcaggacttggagttgcggctgttaagacgacagcagattttgacagtgaaatgtcgaaagtatcagcgatttccggagcaacaggaacggatcttgataaactgcgaggaaaagcccgtgaaatgggcgcgaaaacaaagttcagcgcatcagaagctgcacagggtatgcagtatatggcgatggctggatggaagacgcaggacatgatggacggcttggagggcatcatgaatcttgcggcagcatcaggtgaagatcttgcatcgacatctgacatcgtaacagatgccctgaccgccttcggactttcggcaaaagattccagtcatttttctgatattttggcggcagcatcatcgaatgcaaataccaatgtgtcgatgatgggggaaacgtttaaatacgcagccccggttcttggatcgttaggatacacagcagaagatgctgcacttgcgatcggtttgatggcgaatgcaggtatcaagtcaagtcaggcgggaacgtctttgcgaggagccatcacaaaccttgcaaaaccaacagatactgttgcggctgcgatggataagtatggaatatcattgacagatagttccggtaagatgctttcgttgcgtgaattgatggaacagttgcgtcagaaactgggcggactgtcagaagcggaacaggcacaggcagcagcggcattgttcggaaagaatgcaatgtccggaatgctggcgattataaacggatcagataaagattttgaaaagctggcaggagcgatcgacaactgtgacggatcatctgaaaagatggcaaacacaatgaacgacaatcttcagggacagatcacgatcctgatgtcgcagcttcaggaacttgctatcagcttcggggaaattctgatgccaaaaatccgtgatattgtgacacatattcagaactttgtggacaagctgaatgcaatggacgaaggacaaaaagaaacaattcttcgcatcggaatgtttgtggcagcacttgcaccgatgctgatgggattgggaaaagtgatcacgttcagcgcaaatgtatcacgcgcacttggaacgctgtcagccgggcttgtaaaagcaggcggattttcaggggtattcacgaaagcactgggattgattacatcaccagcggcgattgtagtgggagcgattgcagcaattacggcggttattattcacttatggaatacgaatgaagatttcagaaatacgatcacggcgatctggcagaagatcaaagatgccttcacgacatttgcggcaggaatcagtgaaagactgtcagcgttgggaattacattcagtgatgtgacgtcagcaataaaaacaatctgggacggattctgtaatttacttgcaccagtgttggaagctgctttcaatacgattgcaatcgcattacaaacagctttcaatgtcattcttggaatatgggatgtattttctgctgtattcagtggcgactggtctggtgcgtgggaagctgtaaaaggaattttttcaagcgtctgggatggtctgaaagaatatttttcaacaataatcggagcagtcaaaggcgtagcggatgtttttcttggatggtttggaactaactgggaaactgtctggaatggagtgaaaaccttttttgaaggaatctggaacggaatatcttcgttttttgaaggaatctggaatgggatttcaacattctgcacaacggtgtggaatggaattgttacaaacgtgacggcgttctgcacgaccgtacacgatacaatcagcacaatctttaatgctgtaaaagatgtcgtgtctaatgtgtgggaaacaataaagaatgtggttcaggttgcgatcatgttcatagtggaagttatcaaagccgcatttgaattgataaccgtaccgttccggtttatctgggaaaattgtcgagatacgatcataagcgtatgggaaacaatcaaaagtgcggtacagacagcaatcaattttgtgaaagataatatcatcacgccagtgatgaatgcgatcagcacaacgatcacgacggtatggaatgcgattcagacgacattcacaacggtgataaatgcaataaagtctgcggtacagacggcatggaatttcatgaaggataatgtgatcacaccagtgatgaatgcgatcagcacaacgatcacgacggtatggaataccatcaaaacaacattcacgacagtgataaatgcaataaagtccgcagtacagacggcatggaatttcatgaaagacagcgtgatcacgcctgtaatgaatggaataaaaacagtcatcacaacagtgtggaatgcgatcaaaacggcagtgcagactgtcgtaaatgcgatcaaaacgacggtgcagactgtattcaatgcagtaaagacaacagtgacaacaatctggaacgcgatcaaaacaggaacatcgacggcatggaatgcagtgaagactgcggtgacaacaccgatcaatgccgcaaagtcagcagtgacatctgcgattaacgggattaagtcaacgataagttctgtatggaatagcgtgaaatcagcaacgtcttcaacatggaacgcaatcaagacagcgatcacaacaccgatcaatgcagcaaaaactgcggtaggaaatgcgatcagcgcgatccgatcaaaattcaacttcagctggtcactgccgcatttgaaactgccgcatccgtctatcagcggatcattcagtttgaatccgccatcagttccacatttcagcattagctggtataagaacggcggtattatgacaaaaccgaccgcattcggggcagcaggcgacacattgctggcaggaggagaagcgggagcagaagccatccttccattgaaacagttctatgacagactgggcgacatgctggataaaaagctggatgcaattatgacaggaacaacggtatatgtctatgtaacaatggacggcgaagtcgtggcaacgaaagtatattcaaaagtggaagaaaaattcacaaatgaaataaaacggaggaggtaaagcatgatcataaacgggattgacgtcagaagatacggggcgacattgctgacggcagaaacaaagcccccgaagatgacggcaaactatgaaatgatgtcaaaagcacttcttccgacagagtacgacacagatattccgctgggttctatgacaatgaccatatacttcaggggaaagaacagggcgacactggaaagaacaatgtcatcttttatgcagaatttcaggtcgtcctgcattatggaagaaatcagaggattcaaaggaaaatataaagggtttctgactggcgatgattacgaaaaaacgcttgaaaaggaaaaaagaattctgacattagaatttgatggattcttttttgacgacgaagcggaagcgttatttgatcagaaactggaaggaaagctgtatgcagagggaagcagggacacaccttgcatcattgaagtgacagcaaaagcggatctgacaaactataagataacactaaacggggaaccgtacactattgaaagcctgatgaatggcgaaacgattgtgattaacgggaagaccgggaaaataacaaaggaagggggcaacgctttcggatccgtggatctgtgggcgttccctaaactgcaaacgggaagaaatgaccttgcgttttcaacgaatggcgcaagggtgatagttaggtattccccgatgtggttataaagggggatgatatatgcttcaaatatatgatgatcagcaccggagaattgcaggaatagatgatccggatgatctgaaaattgaaaaaacattatcatccggagataagcagatttcattcagttatccgaaaacaggatcagaaattgaaaatctgcgggctgaatattatatcaggacaaaagatgatgaatatgttctgaaggaaataagcacaggagaaaataaaaacagttatgtagcgcagctgaatatagaagaattggaatcacaggaatttctgtatggatttgagagcgtaacacagacggcgcgtgcctgcttggaattcgcttttgatggaacgggttggacagttggaaattgcacagtaacaaagcgaagaacagtcagcattgatgaaacgtgcaatgcttgggatgtacttcaggaggttatggacacatacagatgcgaatgcaagatcgacagtatccagaagaaaatagacctatatgaagcgatcggaatggatcgcggagcgtatttcatagaaggattaaacctgcggaagttgacactgaaatcagatacatatgatttctacacaagaatttatccagtgggaaaagatgggatcacaccggaaattatgctgggggttccgtatattgacaatcatcagtattcagataaagtgattccgcgctattggaaagatgaacgatacactatcactgaaaatctgatcgaagacgcgactgcgaagctggacacagcatcgaagccgtatacagcatatactgctgacgttgcggatctggcatcgcagaaaaaggaatacagcattttggaatatgacatcggtgatacagtgcatctaatttcaaaaacggaagctacaaaagaaaaacagcggatcgtgaagatgacggaatatccgcagcatccggataaaaacacctgtgaactttctaatgtgacaaagagttttgcgcagcttcaggaagaaacagaagaaaaaatgaagtccgatgcagtggatcaggcacaggcaaggacaaagaaaacgctgaatgaaggatactggacaatcgaacaggcacaggctgcaattaaatcttcagaaagcgggatcatgacatcggttcaacaggtcagaacagaacaaagggatctgacctatgcagcagaacaggaagcgaaagactatgcttcgcagctgaatgaaaagaccattgaaagaatgacaaatgaatattcaacagcactgaatcagactgcaaattcatttgatatgtctattaagtcggtcgaagaaactgtgacatcgcagggcgacgaactggaagaattcagaagagagaatgaaacgtatttccattacacggatgatggaatggagatcggaaaaaagcaagatggcggggtactgccgttttcaacattgctatcagacaaaagactggaattcagacaggaaggcgttccggtggcatatgtgcagtacaataagctgcacattgaaaacgtcgaagcggtgcgaagatggtcagttggagcagcagacgacggcggatactttgatttcatatctacacagtacggaatgggtgtgaaatggagagaagcggagcaggtggaagaaacggcaacacagagcgtcaaaaggaaaaaacagaaacaggaatacaaacagctgatcgacgatgatggaatattcgaggtagtaaaagtatgagtacgacaagaagagaagtaccagtcacaagtatatatgcaaaggctgtcttcaccgggaatgtcagcggagatgtaacaacaatcacatcagtaacattcacgcaaaacgaagatgactggctactgggtgtaaaaaaagaagatatgccatcagtcatgatcattgatggaaaacaatacagatggacagtgaattcctactttacattaaataccatcgtagcacaaggaacatgggtaaaaaaagcaacactgaacattggaacaaagctgacaatcagaaaaccattcttcaaaattgtatacggtcagaatccgacacaagaaggaacagaaatgaccttttcattttacgatctgggatcatttacaccatacggatttaatccgggggcttcggaatttgaaattgatggaaagacggcagttcctatcaatatagaaaatgcaaatgaagattcactgttttctgtgaaactatcatctgatgcaacgtacagattcaagtgggcgattggatcaaagtcgtatacgctggacaaaaaaacgtcaggggcgacaaagatcaatacaagctacaccataccgaaaagctggaatgaagagataaaaaacagtacagcgggatcctgcacactttcagttcaagtgctgtttggatcacaggtatatcaatcaagggatactgcggtgagggcgacagtcccggatgattgtgtcccggtgatcaattccatatccatcgcagatacaaaagggcgtgtccctacggcgtgggggatgttcgtggaacataacagcaatatagccattaccgcagcgaatatcacaaagtcatacggtgcggatattgtatcagtcaatatggaactgaatgacaggacatattatggaacaccttctgcgttgccacagtcatatacgttggaagactacgggatcatggacgtgacggtgaagatccgtgatacaagaggacggacggcggaaaaaactgcaaaagtgacagtcgtggaatataacccgccgacgattcaggtggattctatgaggtgtggacaggatggaacactggaaaatgaaggcgtatattttttagcgacgacagacagcacatattcaacatgcaacggaaagaataaagcaacacttcagatacagtataaactttcaagtcagggtgtatatacgtcagcagtaaaagaacttccgatcggggaagcaacaactgtttgcggcggggatctgaatacagaattttcatatgatgttcgttatgtgctgaaagatacattcaatacagtgaccgtcattgacttcgtatcaacagcggtatatgcaatgcattttttgcatggtgggcgcggcgtggcttttggatcgaaggcaaccgtgaaaaacgcagtggattttacgtttgatgcgatattcaggcatggggtgaaattcataaaatcagatggatccgaagtgacaatgcagcagatcctgaaaaaactcggattatagaaaggagggaagacagtgacacttgaaaaagtaattcagcgaattgaaattgaaatgtcgggcgggacaaaacagtatatggtgtctgcaaaacagggagatcgggcaacaagatatgtcgaaaccgtactactggatcatggggaaccatacacgatcccggcgggatccagcgtcacagctttcatcagaaaaccagatagacacagggtatatacaccgtgtgaattcacggacaatgttgtgatggtggaattggacagtcaggcactggcagcagcgggaacggcattgtgtgaagtagaagtgaaatcttcagatctgatgcaggtggtaacatcggtcacttttgaaatagagattgaagcaaaggtaaaagatgaagatgcgatcgtttcgggcgatgaactttctatcttcgataagacaatgaaacagtatgctgatcaggaaacgaaacgtgtgaacgcagaagaagccagagcgaaggcagaagcaggtcgcgtggacgcagaagaagacagagtgcaggcagaaacaggtcgcgtaaaggcagaggaagccagagtgcaggcagaaacaggtcgtgtgaacgcggaaaaaggcagagtgtcagcggaaagcgatcgcgtcacagcagaacaggaaagacagaagcaggcgcaagaagttctggacaaggcgaatgaagctgtaaaaatagcggggcagatcaatgaagcgtcatatatgctggataaagatgcaaatattaaatatgcatacgcaatttatacagaacggggaatcccacatctggtattaacactgatcaatgagtaaacaggaggaaaagaagaatggaaggaattgatttatcatttccgtcttatgcacagcatgagagaatggcggcggcactggaagcaatcgcactgaacggcggacagaattcggcggaagcacttgacgctgcgtgcagacaattacttgacggaacaaatacaacacgggttttctggtcatggtatccgcgtgcgctggcggcgggcgaaacagacaaatataaattgctttcaaggtttgcaacagcagcagcgcaggcatggaatggaaagacgtatacactgcgaagctatgatccgtcagtatcaggaataacaaaaatgacagcgatggatgatctggcagataaagcggcagcacagctgtgtacagaaaatactgaagcggtcgaagactgggcggatgaagatccgatgacatggtatatcagagcaaacgcgctgtcactggaagacggaaccatgaacatcacatattttgaaggtgaagacggttttgacattactggcgaagatgcaccagtatatacatttgcgcttgcattatggattaaagaatggaatgacggtgcatacgattatatttcattcagaacaacaaggggatccggctattatccggatgcgggggatgtggatccgaaaaataaaaagcgaccgatcacatggcacgcaacattccccggcggtctggacagcaaaggcgcattgacatccggcgcagggatcaaggcatataacttcgcatcagcaacggcagggatccagaaggcacgacagaaaacaatttatgaaggactgtggaatgactgcgatacaagatggattcttcgtatgtggcagttaagacattttgatctggaaaactcaaacatcgctgaaggatgcacaagttacaactatcagtacatggtggcgttgccggaagaaaatgtgaaaagggttcttctgtctgcaagtcaggcagcaggattcattgtcggatccacggtatcggttggcgatatgggcgcacagtcgaataaagacagatggaatgcatggatgcgtaaccttgcggatctggtgaaagtatcttcaatcgaaaaagtaacagtaaacggaacagaatacacagcgatcaatcttgacatcagcggaacgatcacaacgacagcaacaacgtgtatttcaactatgccgtggcattcgggcgcaacagaagcattgccgggacataaagacggatgcacattcagcttgacggcaggaaagacgccacttcgtgttgccggtgtagaagttttggatggatcatatacgatcgggctggatccgctgtatgacacgactgcaaacgaagcaggcggatttgattatactgtgtatcagtgtcgcgacagtcagaaactgtcaggatcaatcacagcggactatgaagatacaggcattgtatattccggtatgccgtccggatggaactatgtgaaagcatttatcaagtcaaagctgggcgtgctgtttccgaagctgatcggtggatcttcaacgacttattttaaatcggctttcttcggtacctcctccgccggggttcgctgcccgtggcgttttgcgcacttgaacgatggcgggactgctggtctggctgcggagcatggcagcaatgcgccgggtgcctcgaactggcacagtcgtccgcggctttgtggcgcgggtaaaaagcggggtgaatggtctgcgtaagcagaccagaggggcaagaccactcatacacacctaacaggaaaagaaaataaaaagggtatgcaggcgcgggatcggctttctacggtaccaactccgccggggttcgctgcccgtggcgttttgcgaacttgaacaatggcgggaatgctggtctggctgcggagaatggcaacaatgcgccgggtaactcgaactggaacagtcgtccgcgaatttatgtatttatgaaggcaggcaaaaacttgctgaaatgcgtctgtatatccgcgcataagcgaaaatcagtaaaaccggaagccgggaaactggcatgtataaccgtgggttatgcgtgcggcaagtagtaacaagacggatcctgattcaaggatctgtcgcaaccgaaagtcgcttcacacataaagtaaaaataagatggcacataaaaagagatataaaaagttaagcagacagctgtgcgaacaggcagttgtcgaatgcttcaaaggaaaatggagaagaaacgatgtactgacgtttattgaaaagtatgcaggaattccacgcgacgatataaaaatagatgatttatccggatcgtggaagtacaaaaatgaagctgttgaagcgattggcttggcaatgcttgggattgtggaagatctggtcgatcacggaatagaaccggacgatatggaaccagtgacgatccggcagcgtccggatggaatgacgggaaagatcagggacattgcactactgtgtattatgcatcagctgatcggtcatattacgaaactgatgatagaaccattgattcaggcacgattgcttccaacgcaacacgcaagcattccgggacacgggcagacaatgctgaaagatcagatgttgcgttatttcctgaaggaatcgctgggaattgaatatgtgagaaaaacagatgttgtacatgcatatgcttcgcttcaatacgatgtatgtatagatctggtgatgatggagatcccgaaggcaagatatgcgatcgggctgctgaaatatttgaagagcgtcgcaccgggtggacatctgatcatcggcgggtatcttgacgcatggctttttaattttgcaatgtcgtatgcgatccgctatctgtatacactgggatcgacgcgaagagggaaaaagataccgtatgttatacgatgcggaacatttatggatgatttttcgataggatccggatctataaaaggagaacagcgggcggtgaaagcattggacaagtggatgacaaagaatcagcacttgcagataaaagaaacgacaggaattatcaagctgttgccgattgaagaagaaaagcgaaggcgaaacctgccacgtccggggcaaaggggcgtcccgatgctggacatggcaggatacagaatcagcagaacacacatcacgatccggcggcgcgtattcaaaagggcaagacgacagctgatccgtggatatagagaactgaagcgtgatggaacactgcgtcgtgaacgggcgcagaagataatatcgtataacagctatattgaacaatctgattcattccatttacaagaaagataccacacggaagaactgcttcaggtggcgcatcgtgtaaatggattctatggacaactggaatatcagaaaagaatggaggaattgcatgatttacttgaacgtagatgcagatcagaagccggaaaaggtaatgatggaaaatcttccgggtggcgcaatgaccgtcaggatggcggacaatatcaaggaataccgtcaggaagacgcaaaggatcggaagatgtaccgttttgatgaagtagtgtttgaacttccggcagacagtacgatcacgacaaaacagatcgaagatgactttgaaaaatactgggagtacgggaagactgatcaggctggaaaagacgaagacatgaaagatgatgaaccggatccggaaagcgggggaatgacgcgggcagaaatgaccgttgaaattcagaaacttcaggaaaagaatgaaatgctggaatcctgtctgctggaaatgtcggagcttgtatatgcttaattttgttaggcattcaatatacaaaattttattcgggaaggagggtgaaacgatgatggctatgttatgggcgcagaagatcatgtatgcggaaacaaaagaagaagcgattgcactgtacaaaagagtgccgcgccttctgaaagataaggttgaacagatcctgatcgaaagtggatgcgaagatctgatcaaagaaagcgaagaacagtaaggagggcagacatgggcgaagtgaaggaaccgtatgaaggcggaactggaagcctgctggaagtcgttgatatgatgtgcgatgtaacggaaaagctggcgggcatcgtcagaaaacaggctgtcctgatcgaacaggagaggatcgcggatgcggtcttccctgccgatctttcagaagaaagaagacaggcagaagatgatcttgacaggatcgaaatgaaactaaggaggatatgacatgaaagaaggaatctgcactgctgttggagtagtaggaagtgcgatcgcagccgctttcggtggatgggatcaggcgcttgtgacactggtgatctttatggtgatcgactatttgtcggggctgattgttgctgggatttttcataacagcagaaaaacagaaaacggagcgttggaaagcagagcaggatggaaggggctgtgcagaaaaggcgtgacgttgctgtttgtgttgatcgcataccgtctggatcttgcactgggtgtaaattatattcgcaatgcggtgatcattggatttatggcaaatgagttaatcagtattactgaaaatgctggactgatgggaattccgcttccgacagtgattcagaacgcaatcgaagttttgacacgaaaagcatctgtgtcaaaggatggtgaacagtaatgaagaaagaatatctgacaatcttgactaacattatcggcggcgtggaatccggcggacagacatatggaaaaagaaaatatggtgcgtatgccggaaaagcagcaaatgcagacaatgaaaaaacgtgtacattaggctgggcgcaaaattacgggaatgaaggtcgaagattgtgtcagatgatcctgaaggcagatccgaaagccttcaggactgctgacacagcaggaatcgaaaagaaactgtcggtagactgggaagctacaagatgggatccgacggcaaaagaaaaagctgcattgattgctattatcacaacggatgcaggaaaaaagtgtcaggatgatttgtttaaagaactgatggaaaaatacatcgctgaagctgaagcatacggtgttgataatatacaagcacaggtgatgtggtgcgaaatagaacatcttggtggttcaaagccagtaaaacgaatttttgcgagagcgaaaaaaccatatacacctgataccgtgtatgcatcgctgatcttggatcagaaggatacaagcaatgataatcaggtgggggataaaaagtttgaaagcagacatcagtgctgcgtgcggtggattaaacagtacgttgtggacaatgtggataaatcaggggaagaaggtgcaaaaatgtattcaagacaggctgttgtggatctggtagaaagctggatcggaaaaaatgaagcggatggatcatataaatcaattattgatatttataatagcttcacaggtgccttcccgcgtgggacaaaaatggcgtatggatgggcgtggtgcgcttgcacttggtcagcacttgccgttgcgttgaaatatacggcaattatgccgattgaaatcagctgctattatctgattgaaagagcgaagcagatgggcgtatgggaagaaaatgatgcacacgttccgaagctgggcgaagcggtgctgtatgattggcaggataacggtgtgggcgacaataccggaacaccggatcatgttggaacggttacatacgttaatcaggtagcaggatattttgtcgttaccgaaggcaattacagcgacagcgtaaagaaaagaacggtatcgctgaatggaagatatattcgaggatttatcacgccaaaatatgacagtgatcaggcggaaagcaagccagtaaatacaccgggaaagagcgtgtcaaccgtagcgcatgaagtaattgcgggacagtgggggaatggagaagcaagaagaaaagcactttctgcaagtggttatgatccggatactattcagaaagaggtaaacagaattctgaatggatcagcggcaacaactacgaaaccacagccagcagatcagaccatcagcaaaacagtcaagtcaacatgctatgcaagagagtatgacaagaagctggcgggatcttacgtcacaacagctgatctgtattgtagaaacgacgctggaaagaataaaaaggctttgtgctgcatcccgaaaggaaccacagtgcataattacggctattataatacatcgaatggaacgaaatggttatatattactgtaacacttgatggagtggagtatatcggattcagttcaatcagttacctgaaagcaaaataggaaggagggaaacagatgttttatgttggaaacactttcgatgaaaaagcgaataaggaatacaaaacaattcagaacgcaaaaaaggcagcagaaaaggatggcttgtcagtatgggatgaagaaggtgtaaaactttatccgctgaaagttgaggtgacagatgacgttcccgatgacgcagcactggaagaaaaaccggacggatctgtgaatgcatatgatgaaaacgggaaaaaagttggtgaagttccggctgaagaaatgaaagaaataatggatgaaatcacagcagaagacgtcgaagcagcggcggcagcagccagaagcgaagaagaagtacatggaacgatccgcagggtgtttgatggaagacttcgccttcgcagaagaccttcgtttgaagacgatgcaatttgtggcgtgacgatgtttgatgaaaagaaagtcgagaagaaagcaaagatcggtgacggggtactttacaagacgacagacgggtactggatttcaggagatccagaacacacagaatttattccggaggaataacgatgattccggcatcatacatcgtcacagcgatcgtgtctgcggcgtttggatctgtgacaactattttcatgctatcaataacagcggcagcaaagaaagcggacgaagaggaagacaagctgttttgtgagtacctaaaaggtaagaaaatggaataatgaaaaaggcagcgatcaaagaacagtcgctgccttttgtgcaatatcacgaaaacagatcgaatacatgacgctgatcgggatctatgcgatgacaatatgtacaaaaaagaagaaaattatttttctgcaatctgcttcaacaggcggatgatttcttcattctgacgcataagaatgaaattctgttcaacctgtgcgcgtgacatttccagtgcgaaagtttcatttgaatttccacttaaaagacttccaaaagaatacatttttgaacctgcaagactggatgcgatttctttaagggatgcgacattcttttctttgatgtcgtccgaagtgtaactgtcgaaatcaacaccgaatttttccatagccgccttgtcttttgcttcctgctccgcctgtttcttggcgattttgtcatctgcttttttaccaaacataggaaaagcccccttcgttatataataatatttgatcagttttctgtaattctgatcattaacacaaatataggtgaaaaaagtgctaatgtcaagaatgatgctgaacattaacacaagggattgagaatgaaggatgaagatatacacctataaaggcaaaaagaatctatgcggtgacaggattcggattgaacgattgaaaaagcgaatgacgcagatggaactggctgcgaaaattcagctgcaagggataacactggaacgcgacagtataagcagaattgaaatagggacaaggtttgtgaccgattacgaattgaagctatttgcaaaaggttttgaatgtgacggttgatgatctgcttgaagaagatgacactatggaatcatagtgttttttctttgtaaaaaagtagctcaatgagtaaaaaaagattgacaagtaggctcaatgggtatataatataattgtaacaagggaacagcaggaaaggagaaaacaatggagaacgaagaaatgagcaaagccgatttaatagcgatgttggtatcaattagagaagtagcaaggacaaacggagaaatacataccgtggaacatattgacaagatacttgaagaaataagaaaataaaatagaataagggatcacacagggggcggatacctaaacattcctgctaaccgccccaagtgcttaattagattatagcaggaaaaaaataaaagacaaggggtgcaaagaaaatgaaagctgtaaaaggatacacaaagcatgattatatcatgatatgcaaagaagaaggcggggaagtttttagttttgcatcaatagatgaagctgctggttatttttcaatgttcgggcatgaactgccgactgatgttgcacttgatggaattttaaatgatactaattgtgactggatagtatttgacgatggaagcgttatcttcaaatattacggaaaagggtatgacgaaagcattatcaatgaaatgattgaaaaagaatgcagaatataaggaagcgaatagaatgaaaatagaagaagcacgcaaacagaaaaatatgagcagaagagaattgtcagagtggctagaaattccatatagaacgctgacaaactgggaaaatggggaaagaagttgccctgactatattgaaaaactaattgtcgaaaaaatattaagggataaataaggctgtataaattacaaggaaccgcagacgatcatggtcatcgcctgcggcttcttttatagaaggagaaagcggagatggaaagaacgttcaaacatttgacaaaagcagaccggatcagaattgaagcattgataaaagcgggagtaaaaatcaaagagatcgcggacatgctgcatgtgcatagaagcacaatatatagagaattaaaaagaggacgttttactgcgcttaattcagatctgacaacggaagaaagatacagccctgatattgcacatgataaatatgaagaaaatctgaagagtaaagggggaagtctgaagattgggaatgacatcagactggcgaactatattgaagaaaagatcatgaaagaagattacagtccggcggcggtactgggggaaattaaggcacaacaaaaagaaaacgaattcagcgtgatgatctgcacaacaacgttgtacagttatattgacaaagggatctttctgcacctgacaaataaaaatcttccggttaaaaagaataagaaacgtacatacaaaaaggtcaagaaaacacaggcgagagcgtcagcgggtgaaagcatagaaaaaagaccggaagaaattgaaacgcgcgaagagtttggacactgggagatggacacggtaaaaggaaagcgcgggaaatcaaagaacagtcttcttgtgttgactgaaagaaaaacacgcgatgaaattgtgatgaagttgccagagcatacggcggcagcagttgtcaacgcgctggatgtgatcgaaagaaagtggggcgatatgtttaaacaagtatttaaaacgattacaatggataacggaagtgaatttgcagactgtgaaggaattgaacgttcagcactgggagcaggcagcaggacaaagacatattattgtcatccgtacagcagctatgaaagaggaagcaacgaagtgacaaataaaatgatcagaagacatattccgaaaggaacaaacttcgatgaaaaaacggatgaagaaatatctgcgattgaaagctgggtgaataattatccgcggaagatccatggctatcattcggcgggcgaactgtttgaagaggagatccggaaaatcagttgaaaaaaagttaaaaaagtgtcgcatttaatattgacattttcaggcatatggaaaactgaaaaaaatactggcgtttttacagtggttatgctatactacagaaatgactgtaaatatataatgcgagtgttaactattttatataaggtatttactcgatatgattaaggaggaacaagaaacatgagtttacaggtggagaaaatggagaaaaacatggcgaaacttacaatcgaggtttccgccgaggatcttgacaaagcaatgcagaatgcatatcagaaagcaaaaggcagaatttctattccgggattccgtaaaggaaaagctccaagaaaaatgatcgagcagatgtacggaaagggagtattccttgaggacgctgcaaacgctctgatccctgagcattacagcaaagcacttgctgagtgtgatcttgagatcgtttcccagcctaagatcgatgtaacacaggttgagcctggcaaaccatttatctttacagcagaagtagctactaaaccagaggtaactcttggtgactataaaggacttgaggttccgaagtctgagacagaggtaacagacgaggaagttgaggctgagcttaagaaagagcaggagaaaaactccagaaccatcacagttgaggatcgtgcagcacagaacggcgatacagcaactatcgatttcgagggcttcgtagacggtgaggcattcgagggcggtaaaggaacagactatccgctgacacttggttccaacaccttcatcccgggattcgaggagcagcttgttggtgctaacacaggtgatcacgtagaagttaaggttacattcccggaggagtatcaggcaaaagagctggctggcaaagaagctgtattccagtgcgacgttaagaagatcgaagcaaaagagcttccggagcttgacgatgacttcgctaaggatgtatctgagtttgatacacttgctgagtacaaggaagacgttaagaagaacctgacagagaagaaagcagaagatgcacgtcgtgcaaaagaagatgcagcagtagataaagtgatcgagaatgcacagatggatattccggaggcaatgatcgagacacagacacgtcagatgcttgacgatttcgcaagaagaatgcagtcccagggtctttccatggagcagtacttccagttcacaggccagagcgttgacaagatgatggaagacatgaagccacaggctcttaagagaatccagacaagacttgttcttgagaagatcgctgaggtagagaacatccagccaacagaggaagaggttaacgaagagatctccaagatggcagagatgtacaagatggaagcagacaaattaaaagatctcatcggtgagaacgagatggagcagatgaagaaagatatggctgttcagaaagctgttacattagttgccgatgcagctgtagaggcgtaataaacctcggaaatggagggcaaaatgagtttagtaccttacgtcattgagcagaccagcagaggagaaagaagttatgatatctattcaagacttcttaaggaccgaatcattttccttggagaagaggtaaacgatgtcagtgcgaacctgatcgttgcgcagcttctcttcctggaagcagaagatccttccaaggatatccagctttatattaacagcccgggtggttctgtaactgccggaatggcaatttatgatacaatgcagtatattaagtgcgatgtatctacgatctgccttggaatggcagccagcatgggagctttcctcctgtcctccggtgccaaaggcaagagatatgcactgccgaattcgacgatcatgatccatcagccatcaggcggtgcacaggggcaggctacagagatccagatcgtagctgaccagatcgcaaaaaccaaaaagaagctgaacgagattctttctgcgaataccggacagcctcttgagattgtggaaaaagatactgaccgtgacaactatatgacagcggaagaagctaaggcatacggcctgatcgacggtgttgtgatccacaaataatgcgtaagaaaagactcctgtaaagacacaggagtcttatcttgctttaaaaaggaattttaaatgtctgcgagagacggacatttacgcttagaaaggaaacaaaaagatatggcagataaagtaaaagaaggaaaggtaagatgctccttttgccataagactgaagatcaggtacgcaagctgatcgcaggtccggatggagcatatatttgtgatgaatgtatcgggatttgctccgagatcatggaagaagaattcagtatgtatgatcatgaggcagattatgaaacagggatcaaccttctgaaaccggaagagatccacagtatcctggatgagtatgtgatcggacaggatgatgccaagaaggcactttccgtagctgtttacaatcattacaagaggattcttgcttcaagaaacctggacgtggagctgcagaagagtaatatcctgatgcttggtccgaccggttccggtaagacacttcttgcacagacactggcaagactgctgaatgttccttttgccatcgcagatgccactactctcacagaggcaggttatgttggcgaggatgttgagaacattcttctgaagatcattcaggcagccgattacgatattgagcgtgcccagtacggaatcatctatatcgatgagatcgataagattacaagaaaatccgagaatacctccatcaccagagatgtgtccggtgagggcgtacagcaggcacttctgaaaattctggaaggaaccgttgcaagcgtacctcctcagggaggaagaaagcatcctcatcaggaatttatccagatcgatactacaaacatcctgttcatttgcggtggtgcttttgacggactggagaagatcatcgaggcaagacaggataccaaatccattggtttcggagcagaggtttccgagaaggaagaccgcaatgtgggcgaagttctgaaggaggttatgccggaggactttattaaattcggtctgatcccggagtttatcggacgagttccggtcgtggtaaccttggattctctggatgaggaagcactgatccgtattctgaaggagcctaagaattccctcacaaaacagtacgacaagctttttgagctggatggcgtgcagcttgagttccaggatgaagcacttgagacagttgcccggaaatctcttgagagaaaaacaggtgccagaggacttcgtgccatcatggagcataccctgatggatctgatgtacaagacaccatcggacgacaccatccgtaagtgtatcgtcacaaaagaggcagtggagggaaccggagagccggagatcatccacggggaggccaaggctcctgcaaaaaaagcaggacacaaaacatcccgttcgagaaagaaaggcaagccggaaacagcttgatgaagggaatgacataaatgacaaatcaggtcaatatattgccaatgatcgctctccgtgggactacagtccttccggatatgatcgtacactttgatgtgagcagggagaaatccatccgtgccgtggaagcagccatgctccatgaccagaagatctttctgctgacacagaaggatcctgaggtggaaataccggaacttacggatctgtatcaggtaggaaccgtcgcttatatcaagcaggtggtgaagcttccgcaggatctttaccgggttctggtagagggactggacagggcagaggttctgggcctggagcaggaggaaccatatctgaaggcggaatgcgagatcgttacggcacaggaagaggattacccggaaccggtaaaggacgccatgcttcgcagcatccgggagctttttcagagatattgcagagaaagcggaaaagtaagcaaggatctggtaacccagatcatgaacatcgaagatgtgcaggaaaccatcgaccagatcgcagtaaatcttccgatggcgtatcagaacaagcagaagcttctggaagcagtgtctttgaatgaccgttatgagatccttggagcgcttcttggcagcgagatcgaggtgatccatatcactaaagatcttcagcgcaaggtgaaatcccatatcgacaagaatcagagagagtatatcctccgggaacagctgaaaaccatccgtgaggagctgggtgaggagaatactgctgatgatatcgatgaatttaaaaaacagctgaaggagctggatgcatctgatgaagtaaaagagaagatttccaaggagatcagccgttttaaaggaatggcagccagtgctgcagaggcaacggtgcagagaggctatctggaaaccgttcttgcacttccgtggaataagaaatccgaggattccgaggatcttgagaacgcatggaaggttttggaagagggtcattacggactgaaagaggtcaaagagcgtatcatggaattccttgctgtacgtaagctgacccacaagggaaagagtccgatcctctgtctggtgggacctccgggaaccggaaaaacttccattgcacgttctgtggcagaggccatgaacaagaaatacgtccgtatctgtcttggaggtgtccgtgatgaggcagagatccgtggccacagaaagacttacgtcggtgccatgccaggaaggatcacagtcgcactgaaggaagccggagtcagcaacccgctgatgcttcttgatgagatcgacaagaccagcagcgattataaaggagatacctccgcagcacttctggaggttctggatccggagcagaacagtaagttcaatgatcactatgtggagattccccaggatctttccgaggtactgtttattgccactgcaaatgatgttcagggaatcccgagacctcttcttgaccgtatggagctgatggaaattccgggatatacggaaaatgagaaggaacatatcgcaagggaacatctgatcccgaagcagatggagatcaacggtattccggaaggcaagctggtaatccagccggcagctcttggcaagctgatcaacaactataccaaggaagcaggagtccgttctctggagagaagcatcggacgtatctgcagaaaaactgcacgtgctatcatggaagagggtaaggataaggtagttgtcacatccagaaatatttccagattccttggcaaagaacgatataactatctgatggccaatgagaaggatgagatcgggatcgcccgcggtcttgcatggacacaggtaggcggtgataccctgcagatcgaagtcaatatcatgcccggaaaaggcgagctgcttcttaccggacagcttggagatgtgatgaaggaatctgcacaggcaggtatcagttatatccgttcggtttctgaccaatatgagatcgatccggaatttttccagaagcatgatatgcatgtacatattccggagggtgctgttccgaaggatggcccgtctgccggtattacaatggcaactgccatgctgtctgcaattatcgaaaaaccggtacgtgcggatcttgccatgaccggtgagatcaccttaagaggccgtgtgcttccgatcggcggactgaaagagaagctgcttgcagctaaatatgccaggatcaaggaagtccttgttccggaaaaaaatcgtccggacatcgaggagatggacagagagatcatccagggactggatatccggtttgtggataacatgaaagaagttctcggtgaagctcttgtataaacaaaaaacagaaaaaccctgccctgaccttcaggacagggcttttaaaagaaaagggaggaataacgaatggtaatcaaaaacgtatcgctggatatcgtctgcggcatcacaagcaagatcccggacacaggaaggccggaggtagcttttgcgggaaaatcaaatgtagggaaatcctccctgatcaatggtctgatgaaccgcaaggccctggcaagaaccagcgcacagccgggaaaaacacagacgatcaatttttataacattaatgaggcaatgtatctcgtagacctgccgggctacggctacgccaaggtttctgcagcagagaaggaaaaatggggaaaaatgatcgagggctatcttcataattccaaagagctccgtgcggtttttctcctggtggatatccgccacaagccttccgccaatgacaagcagatgtatgactggatctgtcacaacggatatgagccggtgatcatcgcgaccaagcttgacaagctgaaacgcagccaggtggcaaaaagcttgaaggagatccgcatcggactgggccttccgaaagagggaaagatccttccgttttctgcggagacgaagcagggaagagacgagatatgggcactgatcgatgagttgaccggccttggtgaaccggcagctacagaggattaaggagagcagaaaagatgggaattatcaaggcgcttaagctgggatttgactatcagagatacgatgatgacggcaatgtggtagacatgcagcgtgcagtcaatgatgtgaacctggacattaaagcaggagaatttgtggcagttctgggacataacggatctggaaaatccacactggcgaagcatatgaatgcgcttctgatcccaacagagggaacgatgctggtggacgggatcgataccgccagagagaccaaactctggaaggtacgccagaaggcaggaatggtatttcagaatccggataaccagatcataggaaccgttgtggaagaggatgtaggctttggtccggaaaatatgggagttcctacagatgatatctggaaacgggtgaatgacagcctggaaaaagtcggtatgacagcctatcgttatcagtccccaaacaagctttccggagggcagaagcagagagtggctattgcaggcgtgatggctatgcgcccgcggtgcatcattctggatgagcctaccgccatgctggatcctaacggaagaaaggaagtcctggaggcagtgcgggagctgaaccgtaaggaaaaggtaacagtcattctgatcacccattacatggaggaagtgatccatgctgaccgtgtttatgtcatggacagcggaaatgttgtgatgcagggaaatcccaaagagattttttcccaggtggatacccttaaggcgtatggactggatgtaccacaggtaacacttcttgcatatgaactgaagaaatccggcgtggatgttccggatggaatactgactacagaggagctggtgagcgcattatgtcaatcgaattaaaaaatgtaacctatacctacagccccgggacagcctatgagagccatgcgctgaaggatgtcagccttgtgatcccggacggccagtttatcgggatcatcggacacacaggaagtggaaaatccacgctgatccagcatctgaatgcgctggtacagccaacatccggccaggttctgtataacggagaagatgtgtgggctgagaaatatgaccggaaacagctccgcagcgaggttggtctggtgtttcagtacccggagcatcagctgtttgaaaatgatgtgatctcggatgtatgtttcggacctatgaatcagggactttccagggaagaagcagagaaagaagcgaagcaggcgctgactcaggttggagtaaaagagtccaatttcaagaaatcaccctttgagctttccggaggccagaaaaaaagggtagctattgcaggggttcttgccatgaacccgaagatcctgatcctggacgagcccacagcagggcttgacccgaagggcagggatgatatcctggatcagatcgcagagcttcataaggtgcgagggataaccattgttctggtttcccacagcatggaggatattgcgaaatacgtggagcgcctcattgttatgaatcacggagaagctgtatttgatgatgagccgaagaaggttttttcccattataaggaactggaaaccatgggacttgccgcaccgcagatcacttatatcatgcatgcgctgaaggaacatgggctgcatgtggatgcagatgccacaacggtggaggaagccagagacagtatccttgccgcacttgcgcaggcgaactctccattactgaacaaaggaggggcggaaaaatgatcagagatattaccattggccagtattatccggccaaatccgttcttcacagactggacccacggaccaaatttctgggaactctgggatttctgatctctgtgttcctgttccatacatttctcggatatgcggtggcaacagcatttctggtagctatgatcgcaatatccaaggttccggtgaaattcatgttcaagggtctgaaggctatcgttatgatccttctgatcacggttgtgttcaatatcatcctgacgcctggcgaagtgctgtggcgtttcgggatcatcaaggtcacaagggaaggccttgttcttgcaggaagaatggcgatccgtcttgtttaccttgtgatcggatcttccatcatgacattgactaccacgccgaatcagctgacagatggtctggagagactgctccgtccgctgaacaagatccgggtgccggtacatgagatcgccatgatgatgtccattgcccttcgctttatcccgatccttctggaggagacggataagatcatgaaagcacagatcgccagaggtgcagatttcgaaaacggaaacctgatccagaaggcgaaaaatatggtaccccttcttgtgccgctgtttatttcggcgttccgccgcgccaatgatctggcaatggccatggaagcaaggtgttaccatggtggagagcacagaacccagatgaagccgctgcattatgaaaaaagagattatgcggcctatggaatccttgtggcatatcttgcggtgggtgttgcattccgtgtggcgggactgtagccaaatcctgccggtactcagacatggaacggtccgaagcgctgcattttgcacagcggaactgtaaccggatcaggcaggcattttgcaggacagtatgtctgttttgggatagaaagtactgcagggatgtctgtatcaggagggaatatattttatgaaacgagtaggacttgttgtagcttatgatggaaccaagtactcaggctggcagacacagccaaatggaatcaccattcagggcgttttaaacgataccttaagtgagctgcttggggaaaaaatcgagaccatcggtgccagccgtacagatgcaggagtgcacgctcttggaaatgtggcggtgtttgataccgaatccaggatccccggggaaaaattttcctatgcactgaaccagagacttccggaggatatccgtatccagctttctgaggaggtggagccggattttcatccccgttattgtgacagtgaaaaaacatatgaatatcgtatcctgaaccggcgttttccggtgccaacggagcgtttgtactcttatttttaccattataaactggatgtggataagatgaaggaagcaacatcttatctgatcggacgccatgattttgctagcttctgcggctccggcgcacaggtgaagaccaccatccgtaccgtgacctccatggacgtgtggagagatggtgacatggtgaccatccgcatttcaggaacaggcttcctttacaatatggtgcgtatcatttccggaaccctgatcgagatcggaaacgggcagtatccgccggaacgcatggataagatcctgaaagcctgtgaccgcggggcagcaggccccacagctccggctcagggtctgacactgatgggaatcgagtttttctgaaaacaggaattttgttgaaaattacaagaaaaaacagttgacaggcaaggtgccttataatataataactcaatgtgacgtagtgcgaagatgcttgagccaatagccccggcgacggcattttatcagcggtttcggacatttccgcgatttattttgcacccgcgtttccatttactttttttcgcggaagtaccgcggtttgagaaacattatcgttgataaataacaggaggtaggaccatgcagacttatatggctaatccggataaaatcgaaagaaaatggtatgtagttgacgcagagggttgcactctgggacgtctggcatccggtgttgcaagtgttttaagaggaaagaacaaacctcagtttacaccgcacgttgacacaggagattatgtaatcgttgtaaacgctgataagatcaaagttacaggcaagaagcttgagcagaagatttattataaccactccgactatgttggtggaatgaaagaaaccacattaaaagaaatgttagcaaagaaacctgagaaggttatcgagctcgcagttaagggaatgcttccgaaaggacctcttggaagagctatgaacaagaaacttttcgtatacgcaggaccagagcacaaacatgaggctcagaagcctgaagttttaacattttaataggaggtagaaaacattggctagcgcaaaattctacggaacaggaagaagaaagaaatcaatcgcaagagtttacctggtacctggaacaggtaaaatcactatcaataaaagaaacatcgatgagtacttcggacttgagactctgaaggttatcgttcgtcagccactggctttaacagagacagagggtaaattcgacgtgatcgttaatgttcacggcggtggatacacaggacaggctggagcaatccgtcatggtctttccagagcactccttgaggcagacaaagactacagaccagctcttaaagctgctggattccttacacgtgatccacgtatgaaagagcgtaagaaatacggtctcaaagcagctcgtcgcgctccgcagttcagcaagcgataattccaatcgaatacggaaatttatcaaaacctcggaaatttttgattttccggggtttttttatgcctgaaagttcttggattttctaaaaaagtgggcgattttgaagtgtagaacacacgtagcgcacaaaacaccttaaaaaatatattgagtatattgcaaagaaaaattgcgtatgatataatgccagtaggcaaaaggtattaaagtgtttataacaaaaagagtgaaagcccttgaagttgcagcttcttgggctttcttcttattttattatagtggataagaaaccactaggctatttgttgtccctatcatgtctgtctaaccatttgcagatgagatggcaagtaacacctgccgcaacagtgatgatgaaggtaattaaagtgtctataacgttcacctcctcccgttgccgggtttcggttggacaacaatagtattatagcgtagaataatacggactggaagcaaatatatttgccctttatggcagtgtatttgcaggaacggtgtagcgccgaaaaaattgaaagcaatgtatgagacactttaatagatatttgaacagacaaggattctgatcggacgaatgggaggtatgcttcatgccgttacagattatcagaaacgatattacaaaaatgcgcgttgacgcaatcgtcaatgctgccaacacttctcttttgggcggcggtggtgtggacggctgcattcatcgtgccgccggaccggaactgcttgcagaatgcagtacgctgcatggctgcgagactggcagcgcaaaaatcacaaagggatatcgcctgccctgcaaatatgtgattcatgcagtcggcccgcgctggcgagatggcaagcatcaggaacaacagcttctggaatcctgttatcggacatctttgaacttggcaaaagaaaatggctgtcaggcggtggcttttccgctgatttcctccggcatctacggctatccaaaagaccaggctctgaaggttgcagtcgataccatcagtgcattcttgctggaaaatgagatgatggtctacatcgttatctttgataagaaggcatatcagattagcggaaaactgtttgttgatatcgcggcgtacatagatgaccgatatgtggaggaacataccgacagtcgagtagaacagagacggcggcttgaagcgttgtcagaggaatcctgctttgaagttgcatctgccccgctgccgtccgaagcaatctgtaaatcttgcagcagtcaatctctggaggaggcactggggcagattgatgagagtttttcagaaatgctgctgcggaagattgacgaaagcggcatgacggatgtccagtgttacaagaaggcaaacattgaccggaagctcttttccaaaattcgctctgataaattctataggccatccaaaccaacagtgctggcatttgctcttgctttggaactgccgcttgcccagatgcaggagatgctcggtaaggcagggtttaccctttcccattcgagcaaattcgatatcattgtagaatattttgtcgaacggggaaactacaatgtgtatgaaatcaacgaggcattgtttgcttttgaccagagcctgatcggggcataaggacaaagaaatgtcgttttctatgcgaccacttcacaaaagaaaatcgctatattatggctgtaaggtacgaaaccgagcagccagtgctaacaccggctgtatcgcagatgtcgatgcttccaacaatagatcgtgaaggaattacaaagttcatcaatgaacagggatatctgacttatatcgtccgtgcggtaaaaatcaatagttatttgaagtctttgatgagcttggcagggctgttatcgcagttcaatatctgtattacagaaagtagagaggcgaaggggcaagcgttggaaaagaccaaggctgatatcgataaatatctacgtgatgttgaatattggaaccagtttgaagaaccagaagtggatcacaaattacattactggaaaatcgacaactggggtgaaaagatatttggttcacatggcgttttgttccttggagcattcatggacaatacaaaactcctcttcccagttttactaataatgaaatttgtttggctgtagttaaaggcaggtttttaaaaaatcctagtacagtagaatataaagtgattaatgatacagtcctctacatgaaggagatgaacaaatgaccaaggaagaaattcaggcatcgattaagtcgataatgttttctggttcagtttgcggtattgaaatatatgcctgcctacgcgatgaaagtggatatcaaaccaaaaaaatcagagcaacagataagttgctttctagcacaaaagataaggtggcaggttttatcaattgtacctatcttgcagatgatgtcgaatttgatacatcagaaaatattgcagacaataagaaagaattttatgagattagtctgatagagaactatagaccctttacttttcttgatgatgctgaaaagcgtacggagtactactcggaaagcgatagaaataaactgtctggatttctttttagaatcaatttgaatgacaagtacttttgggtttatcaacatatatactctgtatcaagaattgatcgaagtaaaaatgttatagccctatttgttggtgatacatacgatgaaattgatagcgatattgtgcagatagattcacgagcagatgtaattatcttttcttcaagtgttgttacggcaaaaatggatcttatgcagagattttttggatttgagcaatacatacgagcgggggcacagaagacgattgagattattcgcgatctggatattgtagatagccttgaaaagtttgttgcgtttgaaaataaaagtaagttgacaaatgcaaagaagttattaaaggcaaaaaattcgcctgttttgcagatgaaaaagaacgatttgttagagaatctgaaaaagcattctcgctacaaaactatgttcaagtttgaagaagatcatattgtgatttcttcacaaaaagaggcagcggcatttattaaaatgttgaatgatgatattgttcggtctgaactcactggaaaagaatatgacagctccagcaaaatgcttttgggcccagtgggagcaagtcactgactgaccaatgataggaaaatatagatgagtgatagaagaaaaaaaggattctatgtcacaggtactgtcagatataaagccccatatgacgaaaaagttcatgacggctcattgtattaatgagcaagatattcagtctatcagtccaatcttcctgcccagatataagaatgtgtagctcatgcagggattgaccaacaacaagctggatttcagaattcaggtaaaaggtgtgttcgggacagaaagaaactaacgaaggctaagtggaaagaaacacagctctggattttttcttcaccgtcatgaggctctttttcggagctgtctacgattgcgaagaaaatctaaaaggcatggattccagttccagaccggatacaagacctccaagagagacaaattcgattctatcctcatagacattgaccagattgcttccgctgaaagagtaatcacggtgaacaatgctgttcagtaaagattctctgattgcatcctctggataatctcttctgtcagttcgatccagatttgaaaaggttgcctttcctttctttttctttctttctcattataaacaagaaagaaaggtcaaggggtgtagaaacaagcattttgtcgacctgcaacaattacaagcctcgttggaaaagcaatggggtgttttttaaccggttttttggtggattcgttttgagagcaactttgaaatcaaattttgttgcttcggcaatgagctgttctatcatagaaatctctctgttgaggttgtagaaggtcttttgaatgaggaaaatacaggtttatagcgttagtgtaaaccactcttctgaaggttagcgatgacttgtaactaaaatagcgacaaaataaattaaaaactaagatcagtctctaaataattgatattctatgtgaaagagcgtataatataagtacaagaacaggaggcgattatatgctggatgtaaatatgataattgcaaacaacattcaggctgaactgaaaaaagaaaacaaaaagcaggttgatctggcagaaggaattggagtctccaaacagacaatgagcaaaattatgaatggtgcaagagcaatcaatgcgattgaacttcataagatttctgaatatctgcatgtgtcgatggattctctgatgaagatgccagaaaagccgatggatacgaatgtgattcatgcgtttatggggcgtgttaaaacagaagaagcaagaaagggaatccggcttgcggatgaactgtccgacatgattctgttccacactagggcatgcgagaatggcaaaaagatggagcagctctgggaggataagtgatgaacaatgttctgaaagatagcctttttgtaagccaaaacaggaaatttgatgaaattcaatctgttgtcaggcagttttcggcagagtatgtcggtaattctattatcaaagataatatttttgctgttatacagaactatgcaagaaagaaagaaattgcactggaactgcttcgttttccaattcatgatgatgaattatgggcattgacttttttgaagcaggatacgatttttgtgtgcgtaaatacggcacttccactatgtaagcagtttttcgctgcgtcgcatgaattgtatcatatctactgttatgtagaaaatgcagaccagagctatataaaaaatggttctatgctggattcggcaacaggtgatgaaacaggaagaacacaggaggacttggaagctaatgccttcgcaggtctgcttttgatgccggatcaacttctccatgagcaaattctactgtatggaattgataaagatttggtttcggtagattccgttttgatacttatggatatgtttgctatgccctacaaggcagttgtactgcgcttgtttgaaagtggaaacatatcccaccagcaggctgaaaagctgctggagataagttctgcgaatgtaatgaaaagggcatcactgataggtaaggcaaagcgctggcagcttgatggcaggggaacagaatcttttggcacactccttgagaaagttgagtataacagacagcatgagtatctgacagaatccagagaaaatgacgatgtggcttacattactcaactgaaaaaagagtacggtttggattgaggggtgtcaaagcgaagtgaaaaaatatgcactgctagataccgatttcatttccaaaacgcactctgttcaagatggcggcgataatcatttgattgaccgggtcatggaattgccggaatatgtgttcttttgtcatgcgcaaatcgtaacagaacttaatcggtataatgctgatgcgccaatctggttgagcgaaaagattggcgcgcaaaagataaaaagctacacggatcaagaaattcttgaaagcctgtcacatgtacgagggccgctggcgtgtgcgacttatacacagatgttaaaattggcctgtgatgttttttctaaagattacttttcggaacattatcgagcattggaagatgctgattacacggcgatatcgagagaggattatttgaaagagcttgaacgactcgatatcgaagtgggcaagaaaaataatcttggagaaatcaagtcttttgtgctgttgcaggtcttgtcggtgatgcttggggagcagatttatgtgttctgctccgatgaccgaaatgctcggaatggcgctacaaattttgaagatgttcgatgtattagtctggtatcggtattctcgcgtttgaaggaggaagcaaactggacgtttgaagatgctgagccgtatattgaatcgctcattgcattttatcaagatcatcaccaaactactttccgagtaatggaagcgtctgaggttagaagattgcaacggataccatgcagacaggtgttgcaggaaatctttaacggaaaatttattgaattgaaaaatggtatgttgcggtacaagcggtaagtgaaaacaggttaaagaataccaacaatcacatgtctagttgggaaaccagcggagaaagttattgcaatgatagaagcaaagagttcagtaaaaacagaaacatcttaaaaagtatacagagtatattgcgaagaaaaatcgcatatgctataatgctcgcaggcaaaaaagaattaaagtgtttataacaaaaaaatcaaaagccctcgaagttgcagcttccagggctttcttcttatttcattttttattacagtggacaaggaatcatcaggtcagagctccgctgtttgcagtatagaagataattgttgattttattacgcaacaggaatattcagtgaataatccggggtgaaatccatcacctgtccggcgtatggaaatcaatattccgttttttacggaatcacgattccggcaaaaagggaatcgcatttttcctaaaaccttataatgatgttatgcactttatagtgtaaattcattatgaggaggtcacgattatgaccaaatatcgagaaatcatccggcttactggattgggattctcacaacgcaacatcatggcaagctgtggtgtttcacaaaaaactgtcgtcaaagttcaaaaacgtgccagagaactaaatatctcttggcctcttgatgaatcaatgaccgacacagagcttcaaaggctcatgttctctaaagagagcaaggtatctgccaacaagcggatgccggattatgattacatccgtaaggaactgcttcgcaacggcgtaagcaaaaaactcctatggacggaatacatggaggattgccgtgccaatggtgaagaaccactcatgtattcacagttctgctatcacatccaacaggatgagcagaagcatcgtgctaccatgcatatcaaccgtaaacccggtgagcaggttgaagttgactgggcaggtgatcctgcaacagtcattgatcctgataccggcgaaatcatcaaagcatacatatttgtcggtgtaatgacttacagccagtatgtatacgtggaagcatttctggacatgaaacagaaatcatggatcaatgcacatgtccatatgtacgaatattttggtggtgtcgccagaatcctcgtaccggataactgcaaaactgcagttgttcataatggcggatggaaagaccagcagatcaatgagacctatcaggaactggctgagcattatggcactgctattattccggcgcgtgtcagggctcccaaggataagccgaatgctgaagggacggtaggaaatatctctacctggattacagcagcacttcgggatgaacagttcttctcccttgccgaattaaatcgtgcaatcagagacaagcttgaactgttcaaccaaaggctctttcaaaagaaagagggtagtcggcgaagtttatttcttgaggaagaaaaaccattgctggcaccattaccttctacccgttttgaactgagcgactggaagacagccaccgtccagttcaattatcacatatctgtggatggaatgctatactcagttccttatgaatacatcaaaaagaaagtggatgtaaaggtaacagataccactattgaaattttctacaaccataaccgcattgcttcccaccgtcgtctgaagggacgccctgggcagtacagcacggtcatggaacatatgccggaagaccaccagaaatatctggaatggaacggcgaccggttccgcaaatgggctgagcggattggcataaatacgtacactgtggtcaatgcaatactgacctccaaacgtgtggaacaacagacttaccgaagttgtatggggcttctgaagcttgctgagaaatactccgatgcattgcttgaagcagcctgtaaaaaggcgttatcctatacatcttcgcccagctacaagagtattaaaaacatccttgtaactggttctgtaaaactggaatcagaaactactgaatccaagaccacacataaagcacacggcatcacaagaggtgccgactactatcggaggtaatcacacatgacaaatcagagtacaatagataaacttattgaaatgcgtcttacaacaatggcagatgcattccgtaaccagcttgacgatcctaaattcaaggaagttccttttgaagaccgctttggaatgctggtcgatatcgaatacagcaaccgcaagaataaccgccagaagcgtcttatccgcaatgccggattcgatcagccggaagcaagtatcatggatatcaactacacttccggacgcaagcttaacaaggatctcattaaccggcttgcaacttgcgaatatatatctgaacaccgaaatctttttatcatcggcgctacaggctgtggtaaaacatacatggcctgtgcctttggcatggaggcttgtaagcagtatttcaataccaagtatgtccgactccctgatctgcttattgatctggagacagcacggacagatggtaactacaaaaaagtcatggcgaagtatgccaatccagttgttctgatcctggatgagtggcttctattgaaaccaacgaattcagaacaaagggacatcttcgaactgcttcataggagacgtaagaaatcttcaacgattttctgttcccagtatgcattcgaggaatggtatgagcagctcggcggtggtgacagtcctctggcagatgcaatcattgaccgtattgcccacgacagctatcgaataaatatcacaagcattgatgctgaacatgatagatcaatgcgtgaggtatatggtttggataaagaactgcgcgagtaaactcgcataattacataggtgatttccacttccggacatctgattcccaaatttccggaagtgcgatttcatcgcacaagaatattcattcagttaggcttacgcacaacagaaaattctcattcaatgcagaaaggggcggttttatgaagcaggatacactggagggcagagcaaaaacgaaaaacggtgtcattcgattatgcttttcggtgctttgtattttgttggaagcagcttttatcattatcgtgatcacaaggctgaatgaatatgcggagatcgttaatctgctgactagagtctttgcaggaattctggttctggcactatatgcatccgatcagacctcttccatgaaaatgccgtggatcattctgatacttgtgtttccgatcatgggtgtagcactgtatcttctgattggattaaatggcggaacccataaaatgcgagaacgatatgcggatatcgacagaaagcttctgccgcttctgccggataatcgggaaaaactggaaaatatcaaaaataaaatccccaaagcaggaaatatcagtgagtatatttggaaaaatgcaggttatcccgtataccagaatacggatattgtttattatgatgaggcggtaaagggattagaagcacagttatcagcactgtcaaaggctgaaaagtttatttttatggaataccatgcgatagaagatgcagaggcctggaaaaagatccagaaagtgctggaggagcgtgtgcaggcaggcgtggaggtgcgagtattttatgatgatatgggctctattggctttattaatacggatttcgtaaaaaagatggagcagatcggaatccactgccgggtatttaatccgtttatgccgggtctgaatgtatttctgaacaaccgtgatcatcgaaaaataaccgtgatcgatggaaaagtagctttcacaggcggctataatctggcaaatgaatatttcaattatacccatccctacggacaatggaaggataccgggatccgtcttgaaggcgatgcagttcagtcgctgacagcaacattccttgaaatgtggaatgcagccaatgacaggaataataatgaggatttcagcaaatattttataagatcagaatataaggcagctcagaacggatttgtacagccttatgcagatagtccaatggatgatgaacaggtaggagaggaagtttatatcagcatggtcaacaaagctgaaaaatactgctggtttataacgccatatctgatcattacggatgaaatgacacatgcgctgtgtcttgctgcaaagcgggggattgatgtcaggatcattacaccgggaatcccggataaaaaaatgatttacagtgttacacgttccttttatcatggactggttaaaaatggagtgcggatctatgagtggacacctggcttctgtcacgccaagatgagcgtggcagatgactgtatggcaacctgcggaaccataaatctggattacagaagtctttatcatcattttgaaaacggatgctttatggcagacagtccggctgtgttatctataagaaatgacctggaagaaacaatgaaggaatgtcgggaagtaacagaacaataccgtacaggacgcagtgcatatcttcgtctgggacagcttttcatgagattgtttgcaggattattgtaaggaagaggtgtagatctatgtgtacagcagcaacgtatcagacaaaggatttttatatgggaagaactcttgactatgagttttcctatggggaagaggtgaccataaccccaagaaattatgagttcgatttccgatatgcaggaaaagcaaaaacacattatgctctcataggaatggcgtttgtagcaggagattatccgctttattatgatgcggctaatgaaaagggactgggtatggcaggacttaactttgtggggaatgcggcatatgcagatgaagcgacagaggcagataaggatcttgtccaggtggcgcaatatgaatttattccatggatccttacccagtgtgcttcggtggctgaagcaaggaggatgctttccaatatgaagcttatgggaacacccttcagtgaacagcttccaacggcacagcttcactggatgatcgcagacaaggaggaatgcatcgttgtagaatccatgaaagacggaatgcacatctatgacgatcctgttggcgtacttacaaataatcctccattcccaggtcagatgtttgcacttaacaattatgcgggtgtatccagaaagcagccggaaagtacatttgcaggagtgctggagctggatccatacagcagaggaatgggcggaatgggaattccgggagatctttcaagccagtcaagatttgtaaaggttgcatttacaaaattaaacgcaatatccggagatggggaaaacgaaagtgtcagccagtttttccatattttaggctctgttgatcagcaacggggatgctgtgaggtatcagagggcgcatatgagatcacgatctatacttcatgctgcaacacgacaaagggaatctattattataccacatatgataatcaccagataaccgcagtagatatgtatgcggaaaaccttgattcagacaagctgatccgttatccgatcatattaaacggtgagatccgatggcataataaataagaataggatttttacagaagataatgaggtaggaagatggaaaattattcaatagtattcagcagcttaaccggtaatacaaaaagctgccagtcagccgatcgtagtgtatacagagatttgactttacagcagagaaaaatatcaagtataatactatagcattattaaaaatcccttccgggaaaacagaaaaaccacaatgataaaggaatataacaaatgagtattttaaatgtagaacacctgacccacgggtttggagacagagcgattttcgaagatgtatctttccggcttcttaagggagaacacatcggacttgtaggcgctaatggcgaaggaaagtccacatttatgagtatcgtgaccggaaaactgatgccggatgagggcaaggtagagtgggcaaaaaatgtccacgcaggctatctggatcagcatgcagttctggaaaaggggatgaccatcggccaggtgctgaaatccgcttttgatcctcttctcaaaaaagaagaacggatgaacgagatctgcgacaagctgggaactgcagatcctgacgagatggatggtctgatggaagagcttggaacgatccaggacgaactgacacttcacgatttttatgcgatcgatgccaaagtggaggaggttgccagagctctgggccttctggatctggggcttgaccgtgatgttacggatctaagcggcggacagcgaaccaaggtacttcttgcgaagcttcttcttgagaagccagatatcctgcttctggatgagcctaccaactatctggatgaggagcatattgcatggctgaaaagatatcttctggattatgagaatgcctttatccttatttcccacgatattccgttcctgaattctgtagttaacattatctatcatatggaaaatcaggaactgaaccgttatgtaggagattacgatcatttccaggaggtctatgcggtcaagaaggcacagctggaggctgcttaccgcaaacagcagcaggagatcagtgagctgaaggatttcgtagcaaggaataaggcccgtgtttccacaagaaacatggctatgtcccgccagaaaaagctggacaagatggatgtgatcgagctggcagcagagaagccgaagccggagttcaaattccgttatggccgaacaccaggaaagatgctttttgagacacatgaccttgtgatcggttatgatgagccgctttccaagccgctgaattttactatggagcgaggacagaagatcgcactggtgggaaccaatggaataggaaaaacaacacttcttcgaagtcttctcggactgatcaagcctctttccggaagtgtggagcagggcgagaaccttgagatcggatattttgagcaggaagttaaaggtgagaatcgaactacctgtatcgaagagctctggcaggaatttccgtcattttcccagtatgaagtgcgttccgcactggcaaaatgcggcctgacgaccaagcatattgagagccaggtacgagttttaagcggtggtgagcaggcaaaagtgcgtctttgcaagctggtgaaccgtgacaccaatattcttcttttggacgagcctaccaatcatctggatgtagatgcaaaagacgagctgaaaaaagctctccgggaataccgcggaagtattcttctcatctgccatgaaccggaattttaccaggatgtggtaaatgaagtctgggatatgagcaagtggacaaccaagatattctgataatggatatagatatatggcagaaaagacagatataattcaaaaagtacaataaatgggacataaaagatgacagcataagggcagcagagtctgccagacagaatacagaggacaaataaatgaaagaaacacaattgaaaaaattcagtatcgttatggagggcggcggtatgcgaggcttgtataccgccggtgtgatcgatgttctgatggaaaatgagatttacgcggacagtgcggtgggcgtatcggctggagctgtttttggatgcaattataagtctaggcagatcggaagagttcttcgctataacaaaaagtactgcaaggataaaagacttgcaagcatccggaactggatcaccacaggagatatatacagccgggaattcggatattatgaactgccctggaaactggatatttttgaccgtcagacctacgcagaaaatcccatgaaatttacagtggtgtgtacggacctggatacaggaaaaccggtgtatcatgaatgtcccaacggagatgtggaggatattgaatggatgcgtgcgtctgcatcgatcccgatagcctcccgaccggtgaagcttgggggaaagagacttctggacggtggtgtgtctgatccgatcccggttaagtggatgctttccaggggatacgaaaaaaacgtagtggtgcttaccagagatgtgaagtaccgaaaaaaagcaaacccgaagatgcagctttttctgaaagcagtattacataaatatccggcttttctgaaggatctggaggaacggcatatccattataatgaaacactggaggaactggcttctctggaaaaagagggtcgcgttcatatcatccgtccgagcagtcccatccaggcggcgatgatcgagcgtgatgagagcaatctggagcggatctaccagacaggaagagcagatatgaaaaaggatctggagaagctgaaagcctacctggattcctgaatcacagaccgaaacaaaattcgacttatacccctttctatgttatccaatgcgtcgtaaaaccccttgcttcagctatggggatataagacgcgtccatcgaatttatgcaagtaattgaagatggacaaaatagtaattgtattaactaataaaccgtagtataatacaaatatgaacacaacatataaatcaaataacaatgtcgtctattcctgtaaataccatgtagtatggtgtccaaagtatagacgaaaagtattagttaatggtgtggacgtccggctgaaggagctgctcacagagtatgctgcaaatctttctgtagacattctggaaatggagatcatgccagaccatgttcatatgcttttggaagtagatcctcagtttggcatccacaaagctgtaaagtcatttaaaggctatacgtccagaattttaagacaggaatttccctatcttaaaacgaaaatgccgactctctggacaaacagctattttgtatcgacggtgggcggtgctccgctggaaacagtaaaacagtatattgaaaaccagaaaacatcgcagagacaaaaggataagatgggataatgcaaaaaggaattaaattcaggatctacccgaacagagaacagaaaaacttcatccatcagaccctgggatgttgccggttcatctacaaccggggacttgccatgcgtaaggaaggctatgaaaatggggaaaagatcggctattcccagacttccgccatgctgactgaactgaaaaagcaagaggagtttgcctttctgaaagcagcagattccattgcattacagcagtctttgcgggatctcgaccggggatttgtgaatttctttgagaaacgggcttcctatccaaccttcaaaagtaaacataaccggttccagtcatacagaacggtaaatcaaaaagataatattcgtattgtgggaagatatatcaaacttccgaaacttggatttgttaaaatacggcagtcgatggaagtggaaaagattaatcacgtgatcattgagcacacaccggctggaaaatattttgcggttttaaatgttgattttgaaccggaaccacgctcaaatgctggcggaacgatagggatcgatgtcgggatcaaagcgttctactccgacagtaatggaaatacggtatcaaatcccagatatctggaacgctcaatgcgaaaactcataagagaacagcgcaggctttcccgaaaacaaaaagattcccataaccgcgagaagcagcggatcagggtggcaagagtgtatgagaaagtaaccaatcagcggaatgatttcctgcagaaacagtcaacgatgctggtgcgtgaaaaccaaaccatctgtattgaagatctgaatgttaaggggatgatccggaatcataaactgtcaaaatcgatagcgagtgtttcctgggcaaaattttttgaaatgctggaatataaagctggctggtatggaaatgaaattcacagagtaccaacgatgtatccgagcagtcagacctgcagctgttgtggctacagaaatccacggataaaaaatctgggcattcgtatctgggagtgtcccaaatgccatgcggttcatgaccgggatacgaatgcaagtatcaatattctgaaaaaaggactgcagatgcagtctgcataaagataaaaactgtaccgtagggcatacgggaacagtataaatatagcttgtggacactgtgtaagacattgcagtaccgtaaggtgtttgccaatgcagtagtgggagaagcgagaatcccctgctttagctgtggggagtgtcaagatattggatatcattacaacagaaaggggtattttcaatgggagaaaaacctcagaatataaaacacagacatataagcctgggcgtgcttgcccatgtggatgcaggaaagacgacattatcggaaggcctgctttttaaatgcggaaggatccggaaaatcggaagagtcgatcacaaggatgcgtatctggatacctatgagcttgagagggagagaggaatcaccattttttcaaagcaggcagttttttccatgggggatatggaagtgacacttctggatacaccggggcatgtggatttttctgctgagatggagcgtaccctgcaggtgctggattatgcgatcctggtgatcaacggagcagatggtgtgcaagggcatacacagacattgtggagactgctgacacagtataagatcccaacatttctttttgtaaataaaatggaccaggaaggaacagacagggaaagacttcttgaggagctgaagaagaaattaagcggatgctgtgtggattttagtggagaactggaatgctccggtgcagaagcagcagggaaaaaggagaatcctgtggataactccgggaaatatccgtcagctgaaggaatacagctgaaagacaacgccagtgaagcagaaaaagagaatatatccggaacgcagggcgcttctgataaaataaatggaacggatgattttctggaaaatatcgccatgtgtgaggagaaccttctggaaagcttcctgaaaacaggaacgatcgcaaaaaaggacgtggcagagctgatcctggagcgaaagctttttccatgcttttttggatctgccctgaagatggaaggcgtagatgcttttatccatggaatggagacctacatggcagtaccgtcctatcccgcagaattcggagccaggatctttaagatcgccagagatgagcagggaaaccgtctcacttatatgaagatcaccggcggcagcctgaaggttaaggagacgctgaccaatgcaggaagaaatggtattccggcagaggagatctgggaggaaaaggcagatcagatccgtatctattccggtgcaaaatttgaaatgctcaaagaggcagaggcaggaaccgtctgtgcagttacaggtcttaccgaaacatatccgggagagggacttggcattgaggcggattctgccatgccggtgctggaaccggtactgaattatcagatcatccttccggagggctgtgacgcccacaggatgctgaaaagcctgaaggagctggaggaggaagaaccgcagcttcatatcatgtgggatgagcagctgggagagatccacgccatgctgatgggcgaggtacagatcgagatcctgaagcatctgatctgggagcgctttcatgtggcagtagaatttgggaccggtaatatcgtatacaaagaaaccattgtcgcaccggtggaaggcgtgggacattttgaaccgcttcgtcattatgcagaggtgcatcttcttctggaaccgggagagagaggaagcggactgcagttttttactgcggcaaatgaagatcagctggatcggaactggcagcggttgatcctgacacatctggaggaaaaagagcatctgggagtccttaccggatcacccatcaccgatatgcagatcacacttctcaccgggcgggcacatcagaagcatacggaaggtggagatttccggcaggcgacctaccgtgctgtgcgccagggccttaagaaagcggagacagttcttctggaaccctattacagcttccgacttgaggttccggcagaaaatgtaggacgtgccatgacggatatccagaggatgcagggaacctttcaggggccggaaacccagggagagctgtcggtgatcacaggaagtgcgccggtggcaaaaatgagggattatcagagccaggtagtttcctacacaagaggcagaggtcatctgacctgtactctgaatggctatgaaccctgtcaggatcaggagcagatcgcagaggagatcggatatgattccgagagagatcttgagaatcctacaggctctgtattctgtgcccatggagcaggcttcgtggttccctggtatgaggtagaagaatatatgcatctggaaggagctcagcttccggacagtaatgatgcctatgaggattccgacaacagctttgcaggagtgcgttcagttcagggaacagccaaaaacagtccggatcgcagaacagccaatgccggccgtggaaaatatacctccatgtatggaagctacgaagaggaaaaagaactgaaggcaatctttgagaaaacctttggtccggtgagctcaaagaaatacagcagtaacagccgaagcttcggaaatccggaaagcggaagtagcttttccgggaagggaggcaaaggtgcagcagattccggccttccggcaaaaaccggtcacggcgcctggagaaacagcagtccggccatccacagagaggactatctgctggtggacggctgcaatatcatatttgcctgggaggatttaagagatctggcacaggcagactttcatgcggcacagtccaggttaatggacatactaagcgattatcaggggatcaagggctgcatcctgatcctggtatttgatgcctaccgtgtggagggccatccggaggaaaccttccagtatcataacattcatgttgtctatacaaaagaagcggaaactgcagaccagtatattgaacgcactgtccataaaatcggacggaagcataacgtgacagttgccacatcagacggactggagcagatcatcattatgggacagggagccgccaggatctcagcgcgcggattcaaagatgagatcgcttccgcaaaacagcagatgagagaagaatggcaggagcgcagggacaacagcaaaacctatctctttgacagtatgacaccggaactgaaatctcatatggaagacatccgtctgggaagaaagaaaaaagaagaattataacaaaaaatatatgccctcattgtgggcatatttcacaaaaataaaaaaactttttgaattcttttgcaaataaatgggaaaagtagtaaaataaggatagaatcctcagtgagaagctccttgtctggatatataacctggcagggagctttcattagagcacaataagcgccaggataacaaaagaaaagtaaaaaaatgaaaggaagtggaaaaatgtttgaaacaggcgaatatgttgtgtatggtcgtaccggcatctgccaggtaacaggagttaccacaatgagggtagatggttcctccggcgagaagctttattatgtactgaggcccggaggagaaacagatgggaagatatttacaccggtggaaggtggaaagcaggtgcttcgcggaatcattacgagggaagaagcggagaggcttatcgatgagatcccatccattgagacactgagtattgagaatgagaaattccgggaggatagctacaagaaatgcatccgtacctgtgaatgcagagatcttcttcggatcatcaagacgatctacgtcagaaaacaggccagattatctcatggcaaaaaaacaaccgctacagacgagcggtatctgaagcttgcagaggatcatctctattctgaattttccatgttactggatatccccaaagaacatatggcagattatattgaacagcgagtacaccagcaggaggaagccgaagaacaggtatgcgctgtttgacaaagcagagcgtatctgctatggtatttccggtaaccttccagaaatcctgtatctgtgacagaagcttcacaggaagtggagaacagatccaggatcagtctgaatgttataaagaaaaggagatgccagagaaatgagagaacagcttacccgcaaggatgttgaaaaaatagagcaggagatcgaacaccgtaaactggtagtacgtaaggaagccattgaggcggtcaaggaggcacgtgcccagggagacttaagtgagaactttgagtattatgcagccaagaagcataagaatcagaacgagagccgcatccgttatctggagaggatgctgaagactgcatccattgtatctgatgcttccagatctgacgaagtgggaatggacgatatcgtggaagttctttttgaagaagataatgaggtggagaagtacaagctggttacttccatccgcggaaattccatggaaaaccgtatcagtattgaatcgcctatcggcaaggcactgcgcggtcatcgtgtaggagaccgggtggaagtaaaggtcaatgatgattacagctattaccttgtaataaaatccatcgacaagaccggatctgaggatgaggagatccgcggattctgatcacagatcgcagggcagctctgctcatgagcatgcagctcagcggaatgagaatatccgcagcacaaaatacatcataaggataaaaaccactgtacgatatataggacagagagatcctgacgggaaatcggtttcccgtaacaggatcctctgttttatttttttacacagattttacattccagtggggaaaattttacaataggccgctattatgaaaatcgttgaaatgagaaaaaaggaaatcaaacatatcaaaaagagaaagtgaaggagagtattatggactttttcagcgtactggcattgcttggcggccttgctattttcctttatggaatgaacttaatgggagacgggcttgcgaaggttgcaggcggaaagcttgagcggatcctggagacacttacctccaatcccatcagagccgttcttcttggaatgggtgtgactgcagtgatccagtcatcctcggcaactaccgttatggtcgttggttttgtaaactcgggaatcatgaagctgtcccaggttgtgggaatcatcatgggtgccaatatcggtactaccgtaacctcatggatcttaagtcttacaggtatccagagtgataactttattatccggctttttaagccgacgtcattttcaccgatactggcactgatcggcgtggttctgatcatgtttacaaaaagccagaagaaaaaggacgtgggagcgatctttgtaggctttgcgatcctgatgtatggaatgaatgccatgagcggagctgtggaacctcttgcagaggtaccggagtttaccggaatgctggtgaaattctccaatccgatccttggagttgtggccggagcagtgctgacagcgatcattcagtcgtcctccgcatcggttggtatcctccaggcactgtgccttaccggaatggtaccgttcagtgcagcacttcctattatcatgggacagaatatcggtacctgtatcactgcgatcctttcagccatcggagccagcaaaaacgcaaaacgtgcggctatggtccatctgtatttcaatctgatcggaaccatgctgttcatggcagtattttatgcgataaatgcagcagtacatttttcatttatggcacaggcagcgactccggccgggatcgcgatcctgcacagtgccttcaatatcacggcaactcttgtccttcttccgtttggaaaggctctggagaagcttgcctgtcttactatccgcgacaggaaggaagaggaggagaaggtggcagcagatccggatttcatgatcctggaaagccgttttctggagaaacctgcatttgcagttgagcagagcaggaatgcagcgaaaaaaatggcagaggattctcacagaactctgtttaccgctctggaccttctgaagaatttcagtgcagagggtaaggctctggtggaagaagcagagaaaaaggtagaccgttatgaggatgaacttggaacctatcttgtaaaactgaaccagaaggatctttccgttcatgacagtcacagtgtttccatcatgctccactgtatcggtgatttcgagaggatttccgatcacggtgtgaacatcatggaatccgcacaggagctttatgaaaaaggcctgaagttttcagataaggcgctggaagagttacgtgtcatggagcatgcggtggaagacattgtagatattgcttacaaggtttacgaaaatcaggatgtgcagcttgcgagagagatcgagccactggaggaagtgatcgatgaactcagcaaggaactgaagtaccggcatatccagagacttcgcgccggagaatgtaccattgaaatgggattcatcctgtccgatgtgactaccagcctggagcgtgtggcagatcactgttccaatatcggtgtttgtgtgacacaggttcatgaagatgcttttgatacacatcagcacctgaagcagatcaaacatgggccggacgaaaccttctaccgtgcgctggaggtgatccggagtcagtatcagcttccggaaataaaggatgagccggcggtagcccagatggcagcggcaggcagccaataaaaagatatcgaaataatgctatgccctggttatctgtatcagcagacggccagggcttgtgcagtaaaaagaaagcagttatactgaaggcatggaacaaaaaagaccagacgattatgaagtgccaacggcaaaaaaacgaacagagaggatatagaatgatctactgtgtggaagatgagagaaatatcagagagcttcttgtctataccctggagacaacaggctttgcggcagaaggttttgaaaccggggcagaacttgacacagccatgaaaaaaaatctgccggaactgatcctgctggatatcatgctcccgggtgaagatgggtataatattttgaaacgactgaaaagtgacaccaggacccgggatatcccggtgatcatggtcacagccaaagaagcggagtttgacaaggtaaaaggtctggagggcggcgcagatgattacatcaccaagcccttcgggatgatggaatttgtagccagggtcaaagcggtccttcggcgctgcgcaaggcagagcgaagagagggaactgcactgtaagggtcttcgtgtcaatgtgtcccgtcacgaagtcagctatcagggtgaggtgaaggagctgaccagaaaggaattcgagcttctggaatatcttatggagaacaaaggactggtcatgtccagaaaccagatcctgtgccatgtgtggggctatgattttgacggagaaacaaggactgtagatgttcatgtacggactctccgacaaaagctgggggaagccggaaatctgatcgagacagtgcgtggcgtgggataccggatcggagatcatgtatgaaaaagaaaattctgcatcatacaagcattatgattatttttgctgttcttgtcacgtttctggcagcaagtgtgatcacctacaataaattaaacacatacatgcagcgtggagtccgtgaggaagcgcagtatatctgccttgccatggatgagtatggagattcctttctcacaaaaaagcttcagacagtatcatcaagtcgtgtgactctcatccgtaaagacggaaccgttctctacgattctgaggcctctccgaaaaaactggcaaatcacagtgatcgtccggaatttatacaggcagaaaaaaatggaaaaagcgaaagtatccgttattcagaaacctttgcaaaaaagaccttttattatgcggtgaagctggatgatggaaacgtgctccgtgtaggaaaaaccgtagactccatatattccacatggatctcaagtcttgctgtgctgggacttctgatgctcctggtactgatcctggagtttgtttttgcacagagacagaccagagagctgattcgtccggtcaacgatctggatctggagtatccgctgaacaatgtgtgctatgaggagctgcgtccccttcttgtgcgggtggatgaacagaaccggcagatccggcagcaggtaaaagaactgaaggaggcagaggagatccggaaggaattttctgcaaatgtttcccatgagctgaagaccccgctgatgtccatttccggttatgcggagcttatgatgaacggcatggttccggcagatcatatacaggaattttccggaaggatctaccatgaatcaataagactttccaatctggtagcggatatcatccagctttccagactggatgaaagcaacagtgaggttccttttgaagaggtggatctttatgagcttgcggaagacgtaagaaataatctcagacatcctgccggaaagaaaaatattttccttgagcttgccggaagtgcagagaagatcaagggtgtccgccatgtactctatgagatgctttttaatattgcagacaatgcagttcgctatacagaacagaatggtcatgtgcggatcatggtaggcaaccggaaagggcatccgttctactgtgtggcagatgacgggatcggaatcccgaaaagtgaacagggaaggatctttgagcgcttttaccgggtagacaaaagccattccagacagaccggcggaacaggtctggggctttccattgtgaagcatggagcaacgcttcatcatgcacagatcaacgtggaaagtgaacagggagttggaaccaggatggagatcgttttcccggagaatacttctgaccgaaaataaactgaaaataatcagtaggatttcacggtgaagtgtagtataataaaaaaaggttcaaaggccggtcggatgagaatctgaccggcttaaactatgtatgggaaaaaatccctgtatttctaaaaatcaggaggaacaagattatgaaagagccggttctggtagtaatggcagcaggaatgggaagccgctacggcggactgaaacagatcgatcctgtagatcaggaaggtcatatcatcatggatttttccatttatgatgccgtacgtgcaggctttaagaaagtgatattcatcataaaaaaagagaatgaacaggatttccgcgatgccatcggcgaccgcttaagtgacaaggtggagatcgtttatgtgcatcaggatctcaacaacatcccggaaggcttccaggttccggaaggccgtgtgaagccatggggaaccggacatgcggtattaagctgtgccggagagatcgacggaccgtttgtggtgatcaatgcagatgattattatggaacccatgcctttaagatggcgtatgatttcctgatccaggcccaggaggacaccgtacctgcccagtatatgatggttggctaccgtcttgagaataccctgacagacaatggctacgtttccagaggtgtctgtgagacagatgaaaacggatatcttgcagatatcaatgagcgaacacacattgagaaacgtgacggcggagcagcctacacagaggacgatggaaaaacctggacaagtctcccgggagagactccggtatccatgaacatgtggggattcaccggcggatttatgaaagagctggtaaaacgcttcccggtattccttgaaaagagcatcccggaaaatcctctgaaatgcgaatatttccttccgtttgtagttgacgagctcctccaggaaaaaaaggcagcagtcagggtccttaccacacaggataagtggtacggagtgacctataaagaggataaaccggtagtggtagccgcaatccagaatctgaaggatcagggactttatccgcagggactctgggattaagtagtaaacctagttttctgctattgtggaaacaaaggaacagtgctaaaataaacaggaacagttagatccaatagaggaggagaaaaactatggcaattttagtaacaggtggagcaggatacattggaagtcataccgttgtagaactgcagagtgcaggatatgatgttgtagtagttgacaatttatgcaattccagtgagaaggctctggacagagtatccaagatcacaggcaaaccggtgaaattctataaagcagatatcctggaccgcgaagcattaaatgaagtttttgacaaagaagagatcgactcctgtattcattttgcaggactgaaagcagttggtgaatctgttgccaagccgtgggagtattatgagaacaatatcgcaggaacccttactcttgtagacgtgatgagaaaacataatgtaaaaaatattattttctcttcctcagcaaccgtatacggagatccggcaatgatcccgatcaccgaggagtgcccgaagggacagtgtaccaacccatatggctggaccaaatccatgctggagcagatccttacagacatccagaaggcagacccggagtggaacgtagttcttcttcgttacttcaacccgatcggtgctcataagagcggaaccatcggtgagaatccaaatggtatcccgaacaacctgatgccatatatcacacaggtagcagtaggcaagctgaaagagcttggcgtattcggaaacgattacgatacaccggacggaacaggtgtccgtgactacatccacgtagtagaccttgccaagggccatgtaaaagctcttaagaagctggaagacaattccggattaagcatctacaaccttggaaccggaaaaggctacagtgttcttgatatcgttaagaactttgaggcagctaccggcgtcaagatcccatatgtgatcaaaccacgccgcccaggcgacatcgcaacctgctactccgatgcaaccaaagctgagaaagagcttggctggaaggcagagaacggaatccgcgagatgtgtgcagactcctggagatggcagagccagaatcctaatggatatgaggcttaaggaacagatagcttaattacataaaaatataaaagcgatataaaacacggcagacagccccggagggatgtctgccgtgttgtttttttgagggtaaaaaagtcgcttatcatttccataagcgacaaacaggccggaaacccgtataaatgaggacttccggcctactttgaccataattctgactgctaatagttcagcttttccatgcacttctgcttttgttttatgctgctgtgcacataaatatccatggtgatcttgacggacgaatgtcccagaatttcagaaagtgtcttgctgtcaaatcccatttccgtacaacgggtggcaaaagcatgccggagagaatgaatgttgatactggggatttcacattgctgaaggagcttctggaatttacgctgtatatttctgggctccatacatttacgattcgtacccgtcagcaggtatgaatcaggttcagcagcaatccgcttcatttttttcaataaaaaatcagggattggaatatccctgatggatgagactgatttaggaggacctatcattaaaacggttttgggttcgtcatcagattcaccagaataatcaagattttttatccgtgagatcgttcgccttatatgtagcagctttttatcaaaatcaatatcttcccaacggatgccgctgagctcgccaacgcggatccctgtataaatacatagcaggatgccgatgggaaattctgagtcctcagcagagagaactgtgatcagctttgtgagatgttcatgagaaataagctggaaaggactggtatttattttgggataccgaaattcaagctgtgaaagattcagatacccttgtttttcaccatagcgtaaaatactgtggaacaggatcagaagatttttgatggtacgtggcgaaagcccctgctgtttcagcttttcagagaaggcatatacggaagcagaagagatgtatttcaacggcatatcaccaaattccggaaggatatgtgtatcaagaagtgtttcgtagcaggcataggtgctgagctttactgcataacgcatggataacatccattcttcactgaggtttcgaaatacataacactttcccggagcgttttgaagattattctgacataaaatagccagctttttcttttttacagcctcgtatgtacgaccatacagatatccgtactggatacgtccattctggtcacgacatttttcatagcgtgcttcccatcggccatcttttctttttctgatattttccccttttctaggcataatcgtagtctccttttcgcactattatagcaaaagtctgaccatttttgtgaccactaataagcgaaaaaaaggaaaatttgtcgtatataaaaaaatcaaccgaaaaaacctgcatttttggtcgaaagtggtgcatttttcgtgtcttgacagtgacagtgtgcaatgctatcattgattaagattcaaaaattatgcaatttgagagaaaatcacctgtcgcttatggaaatgataagtgacaaaaataataatttagataagttatattataatgatttttctttgcaaaaaacggagaaccaaaatgaaagaaccggaaaccggcaaaaaagaaaacaccggaaaaagcggctacagcatcacaacctggcgactgcatctctggtgcagacatccggaatggctgcgaaccacacaggaattttataaccggatcgctgaattttattacaacctgcttctggatcatacggatctctgggaactgggaagccagcagactttacgcgagctggagatcatgagcattccgggacgaggcggacgcataccatcagatcccctcccctggcaaaaggttccactgtattttcgaagagcagcagccaatgaaggaattgcttcagccaaaagctatctcagccgttttgcccaggatgagaagatcggcagagccgagaaactaaatgcagcagttacctattacaaaggaatgtatcaggatttttccactaaagagattacgttgcgtgtctggacaggagacacatggacctggatgcattgccggctgtcaggcagagactttccggaaaacgccagactcatgtcaccatccgtagtttttgaatacaaatatgacatgctgcatgttccagtacgtcagaacaatgaaaatacagcaaccgtacgtcagaggatgcaggcaggatgcaggatactctgtattcagtttacaaacagtgatgcctttgcagcaggcgttgttctggacggaaccggtcaggagattgcagtgaagttctggaaaggcggaaatgaatacagccaccattgcagaaagcttctggaaaagatccagaagtcccaggaagcaaccggaggcagacagacaggcagagttgatcagaaatactggatgcatctgaaacatctttctgaacactatggacaccaggtcacaagccagatcttacgttttgccgtagagcaggacgtctccgtgatcgtacttccacgttataaccaggaatattccagaaacgtcatgaaaggctcaggaaactggggcccgctccatttaagcaccaggatccgccagtatctggactacaaagcctggaaaaacggaatcattgttatcgaagtccacgccaccggcatcagcacaaactgtgccagatgcggcgcagaaatcattcggactgacaccagaacagaactatgctgctgcgccaatggacatcagacgaaccgatatctgaatgctgtgagaaatctggggaaaaagtgcctgacacagtttggacgcagagcatgaagggaagaacaaagcaaacagaacatcagtatgaaaagcaagcagatggattgaccttatggcatgtcagaaaacagatgtcataaggtcagtgcatcggctttgccgtgctgacaaaaagaaagcgaaagcaaaacacggtgtatatcagtgataaacaccgtcgggttgaataccgcctgtcgtgtgtgtacctgaagaaggtgcgggcacggcgaagaatgtgccggcttttgagttggggagtgtattcgaagttatgaaaaataaaaacttgcatatggaggatgaatagaaaaaagagagaaagcatgtaaggaaatattgaaatgacgaagaatacgcctacagtaaaaattatagtagcaacacataaaaaatatgaaatgcctcaagatgcaatgtatcttccactgcatgttggcgcagagggaaaaacagatcagaatggaaatccgctggatttaggataccaaaaagataatacaggagaaaacatttcaaacaaaaacgctgcgtattgtgagcttacaggcttatattgggcgtggaaaaatcttgacacggattatacaggattggcacattacagacgccattttggaaagaaaaccaaggcaccatttgaaggtgttcttacgtataatgagttgcgcccaatgttggaaaaatataaaatttttgtacctaaaaaaagaaagtattatatagaaaccttatattcccattatgaacatacacattatgcatctcaattagatatcaccagagagataatcgctgaaaaatatcccgactatctgaaaagttatgatgaagttgtaaaacacacttacggatatatgttcaatatgatgatcatgcaaaaaagatatctgaatgattattgtgaatggttatttgatattctcttcgagttagaaaaacgcatcgatccacaggaattatcagcatttcaggggcgattttatggaagagtaagcgagataatatttaatgtgtggcttgatggtgagattaaactaggaaaaattaagaaaaatgagattaaagagttgccttaccagcatatggaaaagattaattggtggaaaaagagtacagcgtttttaaaagctaagtttgttggaaaaagatatgaagggagcttttaaataagaggattatgaatgaaaaaatattaatttcatatattattccagcatataatgcggctgatacattagaaagagctgtggaaagtattacacatacttgtaacatggagaaatgtgaaatattgattgttgaaaatggatcaactgattacaccaatagtgttgcattaaaattaattcaaaaatatggagaaaatgttaaactaattcattcggaaaaaggagtgtcaagagctagaaatgaaggattgaaaaacgccagaggagaatggattgtctttgtcgatgcagatgattatatagtatctaaaagcaaaaaatatatttacgaagatatattaaatgctaaagcggatttgtatgtatatagttacgagattggtaatagagcaaattatataaacaataaagaagagaaaacatattattttaatgactctgcagaaaaaatgaagttggaaatgatcgcaaatccaacaaaattcatgcaggtttggggaaagatttttaggaaaagcattatttatgaaaatagaattggctttaatacaaaaatgcagctttcagaggatagtgattttacattacattatttaatgcattgttccagaattagcataagtgatacgatattttaccattattctatagacaatgagtctacgatgaggagtaacgcagataaaaaagtacttcaatatattgaagctatgaatataacgagtaagtatattgaaaaacaacatgaaaatgtacaattggcatttaatgattatattttaatgcatttaaatatagcctgtgttagaggtatattttgcgttaataataaagaaaattatgtaaaaaaaatagagcatataaaaaaaattataaatacacctgtattcaaagatgcgataaaaaagttccatataaagaataatttttcagcgagaacattgcctgttttttttatgaaatataaattggttcatattgcaagtatcatatatattgtgcgggcatatcaaaattatatttacgaaaaaagtagaaattaaaatagtcaaacattaaattgtgaggaaacctatgtataaaatattagtttttggtatgacagaaaatccaggtggggtagagagtgttattatgaattactatcattacatggataagaatacctttcattttgattttttatgtaattcatataataaaatcgctttcgaagaagaaattatttccaatggttcacaaacctttcattttcctgcgagaagtaaaaattataaaaaatacaaaaaagaattaaaaaatttttttgaaaataatgcctctaagtatgatgcaatatgggtgaatgtgtgtagtcttgccaatattgattatctgaaaatggcaaaaaaataacatctgttattacatatttttctatgtttgctcaattaggtattcctacatatggaattcgggcgtgtgcaaaagttagggataatcgtgagaaactttccaaggtggcacaggaacttttgatcattaatataatcatgagtatgatttcttatatggtattgattatattgttgttttatgtacctaaatttagatgtgaaaaagaattgtatgtaatgttgagttttaacattattttgacatctatcggcatggaatggttatataaagccttggaacagtatacttatatcacagtacgatcagttattttcaaatttatcgcgctgatttttatgttctttctcgtacataaacagacggattatgttatttatggtggaataacaatttttgcagcttctgcatcgaatattttaaatttgattaatgcacataaatttataaatctgaagcctgttggaaattacaattttagacgacacctaaaaccagtattgatattctttgctatgtcatgtgcaacaacaatatatacaaatcttgatacggtaatgttgggatttatgacaacagatacagatgtgggatattataatgcagcagtaaaaattaaagtaatccttgtgagtgttgtaacatcattagggacagtattgttgcctagagcatcttattatatacaaagaggagaattgaaagagtttcatagaattacaagaaaggcattgaattttgtctttttaatggcaacacctttgtttgtatattttatttattttgcaaaagaagggattttctttttgtcaggtaataattatgttggctctattatacccatgcaggtgattatgccaactcttttattaattggtattacaaatatacttggaattcagatacttgtaccaacaggacgagagaaaattgtattatattctgagattgttggtgctgtcgtggatgtcattatcaatgcactattgatcccggtttatgcgtcaacgggagctgcaataggtacattggttgctgagtttgcagtttttgttgtccagttttatgcgttaaaagatgaaattttgaatacttttcgacagatacattatataaaaatattaattgcattgtctgtcggtagtattgtatctttgtgggtgaaaatattaaatttagaatgttttttttcattagtaatatcatcacttcttttttttggtgcatatggatttgtattactgattttgaaagaagaactgtttgttgaaatttttaatacaataaaaaataaaataatataatatctgttgcattaaatgatgaaagggagagattaaataaaaagaatggaaaatgtaaacaaaaacaacatatatcggcaagaagataaggatatattaagaattatattggtagctttggtagttataggtcacgggacatattataatataactacaaaatttggaggcattaattacggaactatgatgtcagatgcgtctatatctgatacaatgtttcataaaattacaagcattttaacaaattttatttatacatttcatatgccagcatttatagcgctatctggaagtcttttttcattgaaaaagaatattaataccaggggaactattataaaaaagacaaaaaggttactggttccatttattgctgtatggattttctggaatttacctgttaaatatttttcgggttattaccatggtgttagtataaagggaatgctattgcagttgatttttccttcatgtgtatatttatggtatttagaatgtttgtttttggtgtttgtcattgcaagttttgtttgtaaattagaaacaaaaaagcaaatagttatagttagcttttgttggtgcataggagtaatcttatataaaggattggatcaatatcacgttttgggagatcctttatattatcttttatggttttatctgggatatagattggaaaatatgattgagtggttgaaaaaacataatatttggaaagattcatcgatattatgtttgtttgggctggtatgtttatcttttattgtcgataaaatagtaaagattcattttttccattttttgagttcgtatattgtatgtccattttttatgttgatagttttaaactatatagtaaggcatataaaaataaatggtagagcaataaagtcattgagtgactatggaatgggaatatatttgtatgcagaaccattaaattatttatttttattttggttttatcgtttttgtggaattgaattttttggttcagagttcggggcagcaataatatatttttcaagaattgttataacaccaataatagcaataggtattacatggatattaaaaaaatttaatttgaaatatttatattaataaggcagatagaaagttaaagatgtaactaaagaaattgataacagggagaaattaaaatgatgtacaattatttagtagtaggttccggcttatacggagcaatcttcgcgcacgaagcaaaaaaatcaggaaagacagttcttgtagtagacaagcgaccgaatattgctggaaatgtttacacagagaaaacagaaggtattaacgtacataaatatggagcacatattttccatactaacaacaagaaagtatggaattatatcactcagtttgcagagttcaacaggtttacaaacagcccggtcgctaattataaaggggaactttacagtcttccttttaatatgtatacatttaataaaatgtggggtgtggtaacaccggaggaagctgcagcgaagattgaggagcagagaaaagaagctggaattacagaaccaaagaatctggaagagcaggcaatttcactggtcggacgtgacatttatgaaaagttgatcaagggttataccgagaaacagtggggacgtgactgtaaggatcttccttcgtttattattaaacgtctgccggttcgtctgacatttgataataactattttaatgctttgtatcagggtatcccagttggaggttacacgaagatggtagcaaatcttctggaaggtattgaggttcgtttgagtacagattatctggaaaacaaagatgaattagatgcgatggctgaaaaagtagtttacacaggtccgatcgatgcatattttgattataagcttggtacactggaatatcgttccgtgcgttttgaaacagaaactctggataaaccgaatttccagggaaatgcagctgtgaattatacggatcgggaaactccatggacgcgtatcattgagcataaatggtttgaatttggtaaggatgaggaaggtaacgatcttcctaagacagtgatcagccgagaattcagttctgagtggaagccgggggatgagccgtattatcctgttaacgatgaaaagaatggagctctttacgcagagtataaaaagctggcagaagctgagacaaatgtgatttttggcggacgtcttggtgaatataaatattatgacatggatcaggttattgcggctgtattagaccgctgtgaaaaagaattgcattaagatcaggaaatgagggaaaattaaatgcaaacaacattacttatcatggctgctggtatcggttcccgttttggcggtggtatcaaacagctggagccggttgatgaacagggccatatcatcatggattattcgattcatgacgcaatcgaagcaggttttaacaaggtggtttttattatccgaaaggatattgaaaatgaatttaaggatgtgatcgggaatcggatcgaggcggtctgcaaggcgcattctgttactgtggagtatgttttccaggatatcaacgatattccgggagaacttccggaaggtcgtacgaagccttggggtaccggacaggcggttctggctgcaaaggacgttttgacaacgccttttgttgtgatcaatgcagatgattattatggaaaagaaggattccgtgagattcatgattatcttgtaaaaggaggccagtcctgcatggctggttttgtgttgaagaatacgttgtctgataatggtggtgtgacacgtggtatctgcaaaatggatgagtataataatctgacggagattgtggagacttccaatattgtaaagaatgcagaaggtgccgaggcggacggcgtaaagctggatacagaatcacttgtttctatgaatatgtggggattggcaccggagttcctgaaaacgctggaaagtggttttcaatatttttttgaaaaagtggtcccggagaatcttataaaggcggaatttttgattccaacatttattggagaacttctggcagaaggaaggatatccgtaaaggttcttcgtaccaatgatacttggtatggtatgacttataaagaggatgttgctgcagtgaaggatagtttcagagagatgttggaaaaaggaatttacagagaagagctttttgctgatttataagagtttttttgtataaaagcgagaccgtcagtaaatggggataatgttactattattttatatagaaggcatataagaatatagaatcatttgcaaatggccccaatatataaagaaataaaggaacattgtgatgaatatatcggtgatgaattcgaaggataattggaatatatttagcaaaaatcgtaatgcaatttatggtgtggcgataatttcaattatgatatttcatttttttgaagatatagcaaattcaaatttatccggagggggattgggatttttaggcaagttgtataacacattcattggtagtgttggagttgagttctttgtttttctgtccggcgttggattatatttttcgatgtcaaaagattccaatattttgcatttttttcagaagagaataaagagaattttgccagcttatcttatggttgctattccatattggattgtgattgatcttattatcatgcaaaaaggtgtcaagatgtttgcatttgattttggctttgttacattttttacacaagggacaagaaccttttggtatgtgttatttattgtttttgcatatttaatttatccatttgtttataagatattgcatgtaaagtggtcagattgggggcaactgttaattcttcttattatagctttagttattcaatttttaccgagaattgtagctcctgtattgaatttaaatatagaaattctattgggaagatttcttgtttttttcatagggtgttggtgtggaaaaaaagtttaccagaatgcttgtattaataatatagataaaatgggaattttatttggagtaatgataatgctgtgcggctttttaccggtaaccaaaatagttgtgtcaaaactaggatttaggattttgatgtgtttttgggggatttttttgctgtattgtattgctgtaagtatgcgaaagatgcctaaaagaattgtaaagatattggagcagtttggaaaaatgtcttatgaattatatttgactcatgttgcaattagagcacttatgaatgttatagggataaatgaatattacggtgcggcagagccgccagtccggtgtggcgagagccacctgtccggactaacggagccacctcagtttgtttattaagttactttgccattgttggatccagtccatatacttctctcatagagaggtctttagctgggtcaacactttcaatatcgatcttataggaatcatacgatatacgatccatgatggcatcggcaagagtactttcaccatcgcagatttgctggtaccattcactttcacggaactgagaacaaaagattgttgaagattttttacgtcttttatgtatcagttcaaaaagatttctggcttcagcttcggtcagtttaagaagcagccactcatcaagaatcagtactattggcttggtatatttcttcaggacattcgagaaagttccattgtccctggcagcctgtaagtccaataatagatcaggaagtcgtacataccgtactgagtaatagtgcttgcatgcttccatgccaaaggcacaggccatataagttttaccacttccggttgctccagtaataaagatgttcctgtattctgtaatgtattcacaggttgccagacggttgatcagtgctttgttcagctttcgtccagaatggtaatcgatcgctgcgatgctggcatctggctgttcaaactcagcctggcggatcagccttttcagacgattgtttttacggttgctatactcgacatcaacaagcataccgaagcgatcttcgaatggaacttccttcattgcaggatcatccatctggatgcggaatgcatctgccatagcagtcagacgcatttcaataagtttatcgattgtaccttgatttgtcatgattgtttacctccatagtatctggctcccctggttatgccgtgtggtttttctacttgagatgattctgattcggtatcaggtgcatcctttgttgcaaccaatagatttttgatacttttatagctaggtttaccggaataagagagcgccttagcgcagacctgttccagcttttctggcgaatatttttctgccagtttcagtaatcccatgcagcttctgtaggattgttgttcaatcctgccggaggtaagtattgcatcgacaaccttacttgtgttaattccaagcgaatcagcccacttacggaaccggtcaccgttccattccagatatttctggtgttcctgcggcatatgttctgtcactgtagaatactgaccgcttcttccatagagtcgtctgtgagaggcaatacgattgtgattataaaatatttcaaccgttgtatctgttatacgcacatcaaccttatttttgatatactgataaggcacggagtagaacattctgtctactgcgatgtgatagttaaactggacggtggcttgtttccactcagccagttcaaaaggtgtagcaggcaacggagccagtaatggcatttcttccccaagaaataaactgagtctgctacattcctttttctggaatttacgggcgttgtaggcatccagtttttcacggattgaagcattcaattctgcaagagagaaaaactgttcattgcgaagggctgctgttatccatgtggatatctttcctaccgatccctctacattcggtttatctttgggtttccggactctggccggaaggatggcaagattgtaatgttctgccatctcatgataagttgtgtttaaagcagtgttgtaccagtcactctttttatgattcactgcggttgtgcagttatcagaaacaagcataggtgtgacaccgccaaagaaatcaaacatctggacatgagctttgatccagttgtcggttttctcattcatatatgcttttacaaaagcatactgactgtaagttaatacacctacaaatatccatgcatctgttatttctccggtgtccggatcaatgatgtgggcagggtcaccggcccagtcaacttcaatctgttcacctggttttctggggatatgcatggtagccctgcgtttttcttcatccttctggatgtagtagcagaactgagaatacattagaggctcttcgctgctcatgcggcactcctcacagtattctacccagagaagttttttgtttacgccgttccgcagaagttctttgcggatgtagtcaaagtttggcatgcgtttattcgttgccgacttatccttaggaaacatcagctcctctagtgcgctgtcggtcatgtcgaaatccagcggccatgaaagcttgatttccgctgccttttttaaaaccttagcgactgtgtttctggatacaccgcaactctgtgcgatgttcctctcactgaatcctaagcttttcaagcgtaggatttcacgatacttggtcataacttacgacctcctttatctgtattcacaccaaaggtgtgtatttacagtataaaggaaatatatgtaatagagcccaataaggtggctctgaattaccggaatatatggctctcattctccggaatggtggctctcaaagtccggacaggtggctcaaagagccccggaataatcagataaagacattttattttcaaaattatgtttttggtattttgataagtttgtttttgacatacacaattgtaaaattacaaaaaaagctgatttagggtaatagataataatcggcttctgccttggtcagaagaatagcaaaatgctcagatcccccacaaaggatctgagcatttccaatacgaactatttcttctgtaatttcagcacgtcctcaagagaaaggcctgaaaatctggagatgtcttcaggggagaatcttggatcctgaagcatacgctgtgctgtcagcatagcttgttcctgatggccttcggcacgtgcatcatcgcacatttcctgaacagcctgacacatattaaccctcccttctgtttctgtgaaacgtaagttgatacctgttatggagtcaatgacccgggctgctttgagctcgagtgaccggaagccgggactctgtgatgtaagctcctggagcttccgtttatctttggaatatttgatgaagagcatgacttctttgagattgctctggagtttgtcaagttcttcatcctttatctcggcaggtgagaagagattgatccggtaatccgggaccatggaaagaatttcggggtcctggacagagagcatttcgtggaggctcctgggagcgttccaggtgtcggaaccgaagtacacgaccgtggttatgaccgggatgagccggtcatccttgtagaagccggtgagatattctccggatgtagaaggccattgctttgcttctctgtgtgatctggcggaattttctacctgccctgcgtattctaatgcatcatagaccatgtttttgaccggcattgcgtagtgtgtttccgattgattttcaatccccaggagaagataaatccttgaatcatcgtgcataacattaagagatttgaattcgtcccggaatttctggacaggaacttctgaagtgccggatccgtatgggacagcgagagctgtggtatccagtggatgaagagtgtcagggtctatgatgttttttcctttgtacagcatatggttgaacacatccgcaaaaacgcggttgtcagccatgtaatctttggtgatggtatcctttgtacccataggtttcaccaccttcgatctgtttatgtgattagagtagtttattatctgatccagttacagggtatcatacattttgggtaagcgcttagtttttgggtaactagatattcgccggttcctaactcataatgatagcagatagatttttactccacttctttgataggaggtagaaattcactacatttggaggtttcattatgagtgataaacgagccccaaggcgttccttggatgattggatggaactggtgactgaatgcaggcaaagtggattaaccgatgctgcatggtgtgaagcacaaggtatttctccaagttgcttctataatgctgtttcccgtctacgcaaaaaagcctgccagataccagatccgattggcagagccagcactcttgatcttacatcccacaaacaggatgtagttcagattgctatagagccggaaacttctccggcagaactgtttcaagatgaaagaagcagttctatgtaccttgacaattcacatacgattgagattgaagcaaaaggattaacaatccgtatgagcaatactgttcagcctatgcttttgaaaattttaatggatgcattaaaggagccattatgttagcggacatttccaatgtcgatgcgatctatatcgtttgtggcagaacagatatgcgtaaatctatcgatggattatgcgcaattattcaggagcaattctctatggaaatcgaccattcgctctatctattctgtggacgcaaatgcgacaggattaaagctatcttaaaagagcctgacggaattgttatgatctacaaaagactcaccgcccaaggctcttaccggtggccccgggataaatcagaagtccggaatctcacttggagagagttcgactggctgatgtcaggcatcgatatcgagcagccaaaagctattaaaaccacttaaactgtacggcaaaaaatgcacataaaagcactggatttccttgaaaattcagcgcttttcaagcctcttatcgccccgttttcctaggagttttccatgatttctggtataatagaagtatcaaaaaccgggagggaaacgcagtggcagacagttctaaaggccttcaactccgtgagttgaaagacatgatcaacgatctgaaaaaaatgataaaaacacttcaggcaactgtagatgccgctaacaaacgggaagaggctcttactcaggaacgggataatttaaaggaagaagtggatctgcttcgcaaaaagcttttcggttcttccagtgaaaaacgttccatggatgttccgggacaattgaatttatttaatgaagccgaactggaacagaatccaactattgcagaaccagaagcgttggaaagtcttttgcctgagaaagagacaaaaaagcggaaatcccgtgcaactaacgcagaacggttcaaagggattccagtagtcaaaaaatatctggatcttccggatgcagaaaaagtctgccctgtttgcaacgctcctctggtaaaaatcggtgaagaattcgtacgccgcgaactttccttcgtaccggcaaagttaaaagtgatcgaaatatacagcttaaattatatttgcccggaatgtaataacgatgacgttactgttatcaaaaagggaaaagacggccatgcacatatgcttcacggtatggctgcggcagatactatcgcctgggtcatgtatcagaagttttgtaacagtcttccttatacccggcaggaaaaagactgggcacagtacggtgttgctatcacaagagcaacgatggcaaactgggtaatccgtaatacattggattatttcaccccgatgtatgattacttccaccggcaactcttaaaaagggaattcgcaatggcagatgaaacaccactccaggtattacacgaatccggcaggcgtgcacagaccaaatcttacatgtggttattccgcagcggggaagatggcgaattcccaatcatcctttataaatatgcagaaacccgtaccgggaataacgcagtagaattccttgagggattcaaaggatatctgatgtgtgatggttacagtggttacaacaaagttcctgatgccaaacggacagcctgctgggcacacatccgcagatatctgacagatgcgattccgaaaggaaagcaactggattatacacagccatctgttcaaggcatgatgtatatcaaccagctttttcatttggaagatgtcattaaagcgaagtactcatccttcgatgctatcaagaaagctcgtcttgagaaagaaaagccgatagtagaaggctttttgtcgtggcttgataaacagaatccagtccgtggatcaaggatggataaggcagttacctatattcagaatcgccgatcctatcttatgacctatttggaagatggtcgctgcagtttttctaataatctcagtgaaaacgctattcgtccgtttacagtaggccggaaaaactggctgttctgtgatactccaaacggcgcccaggccagtgctatcgtctacacaatggtagaaatggcgaaagcaaatggagtaaacgtctatcactatctaacctatcttctggaaaaactcccgaatgataggatgaacgatgaagagttagataggcttgccccatggaacgaagaagccaaagctgaaatcgaacgtcgtgcaaacgactcaaatcaataatcaatcatatgtgaattatcaaggtgctccggttgcagaaatgtggccggggatttttgtacccatgtctaaaatttaagcgcttaccattttggtgtttgagaagcggatatctgatattttatcgggattttacagtggcttcttgccagctacccttttccggtgttaaaataacagcatcaatgaaagaacagggagaatgaaagcaatgtacgattatcttatcgtaggtgccggtctttacggtgcggtttttgcacaggaggcgaagcgtgccgggaagtcagtgcttgtgatcgacaagcgtccgcatattgcgggaaatgtatatacagagaaggtggaaggaatcaacgtgcataaatacggtgcacatattttccataccaataataagaaagtctgggattatatcacccggtttgccatcttcaatcgttttaccaacagtccggttgccaattatcacggggagctgtacagtcttccgtttaatatgtatacctttaacagaatgtggggcgtggtgactccggaggaggctgcggcaaagatcgaggagcagcggcaggcagcagggatcacagaaccttcgaatctggaggaacaggctatcagccttgtaggtacggatatttatgagaagctgatcaagggctatacggagaagcagtggggacgtccatgtacggagcttcctgcttttatcatcaagaggcttccggtgcgtctgacctttgacaataactatttcaatgcgttgtaccagggaatcccggtgggtggttatacgaagatggttgctaatctgctggacggtatcgaggtacggctgaatgaggattatctggagaaaaaagagcagtacgatgcaatggcggagaaagtgatctacacaggtgccatcgacgcgtattttgactataagctgggtactctggagtatcgttctgtgcgttttgagaatgaaacactggataaacctaatttccagggaaatgcagcagtgaattatacggatgtggagactccatggacccgtatcattgagcataaatggtttgagttcggaaaggatgaggagggcaatgatcttccgaaaacggtgatcagccgggaatacagttccgagtggaagcctggagatgagccgtattatccggtcaatgatgagaagaacggagcgctttacggacagtataaggagcttgcagagaaggaaccgaaggtgatcttcggcggccgtcttggcgaatataaatattatgacatggatgcggtgatcgcttctgcgctggatatgtgtgagcgggagcttgcataaaaaagatactggatataactaatgataaaatcctcttatatttcggagccaaggcaaaagagaaatataaggggattttatgcatagaatggcagtgagattttttgagggaggaaagagcaatgaaaaggtgcaaaggtgtgcttctggcaggaatgctggtgctgagtatgagtgttccggtgtatgcggacaagtcggttgtggtgaaggtggaagctccggcagataccacagattattatatgactgtggattccggtggagttggtgtggatatctatccgtccaccgacggaaaaggtgaaaagctcaatgataagacggtaagggatggtactgtcctgcatatcgaaggggagacagagaagaatggtgagacctggggatatacagagtataatggcagatacggttatgtgccgctggaggagctgcggccctcaaaggatgcggagctggcgaaggccggaatcgcagggggcacagagaaagagacttctgcagtgaatcagggagacgcatccgatacgcaggattccgcagccggcgagactcagggggaagcagcagggacggacaatacaggcagttctcaggctcagaatgacgaaggacagggaacgtctgcagggacggacaatacaggcagctctcaggctcagaatggcgaaggacagggagtgtctgcagggacggccagcacagatgaatctcaggctcagagaggcgaggttcaggggccacctgcagggacggccagcacaggtagttctcaggctcagagcggcgaggtccagggaccgcctgcagcggatggaacaacagaaggtggggaatctgcggatgaagctgtcaccaagccggtcaatggcacagctgcgacatcctttaaagaagaaaattcctggtataaaagtccgtttatctggatcgggatcgcaacagtacttgcagtaatcggaattctgggttatcatttgaagaaacgttaacagataaatcagatcaatataagaaaagtggagaactttgtgaagagattacagcttgtcaggaagaaattactgccgcttcttttgtgtgtggcagttgcgggcagccaggttccggtcatggcagccgatgtggaaggtttcagtgattctgcggaaggcttcaatgaagaatggtcagaagatacacagacgcagtcagcggaagcagaggatacgacggagaccgcagaagggaacaccgcagaagggaacaccgcagaagggaataccacagagaacaccggtattttggatgaacagacagaggatattgcagaggcagccgatggggataccgaggatatagccttgcagagctccgaggaggatacagagactcccgaaatatcagaaggatcgtcttctgattcccaggaggatacctttggtgacggtgaggagagcttcggggatgcctcagacagtggtgagtccggcatcgaatatatcaagggccgtccgcttacggaggaagaggagcaggaacagctggcaccctttgataatctgacttcttattccaccgccgtggagatcggaaatgatgtggatgaggtaccgatgggaagagctgcggcctatccgtcctattataatgcagcggatcagggatatgtcacttccgtaaagaatcaggagccctacggtatgtgctgggcatttggaatggcctctcttctggaaacttcgtttctgacccagggccttggaacttatgatctgtcggaagagcatctggcgtatttttttgcaaacagaaagaatgacccgcttggaaatacctacggggatgtcaataagcatatggggacagatgataaaggaaacgcagattatcatgagggcggaaatgatcttctggcttccatgtttctgagtacctggtccggaatgacaacagaaggggatgtgccgctggcaacagattccacgcatacacagaaaaccggtgtgactccggcggcatccaaggcgtacaatgcagctgcttatctgaaaaatgcctatttttccgattattccgtaaatgccatgaagaagcttctggttgcaaataattcggtcactgtgatgtataatgcacagaatgcctattacaatgcaagtacagcggcctattcctatcctaccagcaccaagaacgtgaatcatgtagttacagtggtggggtgggatgacaattattctgcgaagaatttccgggcatcttccaaggtaaagggagacggagcctggatcgtcaagaacagctggggtacaggctggggaaaatccggatatttttatatgtcctatgaggataagtctgtcagtgagctggttgcggctacggctgtcaatacaccgaaatatagcaacaattatttttatgacggaacgtcagggcttggctccatccgcatgtatgcgggagaacagctgtccacggtttttcgtgccagtgcaggaaacggaaaagcggaatcgcttggtgaggtgactcttagctccatgtctgccaataattcctatactgtgcaggtatacacaaatctgaaggatgccagtgatcctaccagtggaacaccggcatattccacaccggtttcttgcagtcagccgatggctggggttatgacttttcagatcccggaggttctgctcagccagaacagtctgtattctattgtggtgacaaatgcaggaagcacatatataaaatactgtgtggaggcagaggtcagttatggctggtgcagcttttctccgtctatcgtatcaggtcagagctttctgcgatataacgcggaggatacctggatggatgcggttgaatttaatccatcggtaacgccgaggatcaaggcgcataccaggactctgagcagtgcggccaggatgcagctttcttcctctgagatagatctgtattccggagatcagaaaacactgaatgcctcggctaccagatccgagatggctgcttccggcattgtctgggaaagctcagataccagtgtggctgctgtaaatggaagcggcgttgttactgcaaaaaatccgggaacagcaaccataacctgctacggaaaaaatgccaggggaatccgggctacctgtaaggttacggtgaagcttcgtcagaccacaggtgtaaaactggtttccaaggcatttaacaggatacggatctcctggaaagcagttcccggctgcaatcgttatgctatctatcgctgggatgaaagagaaaattccaaaaaaatggcaaccgtgacagtagatgtagtgacctggcaggatactgcagtgaaaacaggaagcacttatacgtatcggatccgggcttcttatgtacattccggaaagaagactgtttatggagccgcatcttcgccgttatcggcaaaagcggagctggggaaggcccgtgcagtggctacggctgtcagcggaccatgtaacagggtatcctggaagaaggtttccggagccagtggctatcatatctatcggaaactccaagggaaaagctgggttcggatcggaaccgttaacaacaaagtattgtcttggcaggacacgaagattgagggaatcacctcctacgcttatgctgtgaggccatataagaatgtagacgggaaaaaagttttcggaggatatcaggcaagcagctatatcctgtcctatccggaacttcagaagatatccagtgttaggaagacctccagggggctgaagatctgctggaaagcgcagaagaaagcagattgctatcagatctaccgtaagaccggaaagggttcatggaaaaagatcagtacagtttccggaggcagcagctcctcctttgaggataagaccgcaaaaaagggaacaacgtattactatgcggtgcgtgcagggataaaaacctccggtggaaaagtactctgcggaggatatgccgcaaaagcagcaaagagataaaagtgttaaaacataaaacgcccggatctggcttgaagcattccagatccgggcgttttatgttttggttgaatatgtgtattatatatgattatatcaggcagttcaaaagaaagatcagtcgttgttgatcacaacgcctttctgaagcatgatgttggcataaagtgctttctcacttgtggagatgatgcagtatgcagtttttgcttcgtcatagaatgcgaaacgctcgatgtttccgacggctttttcgccacgctcgtcatgcttggaaacgatttctttatatgtatcccagatcggtgtctccacattatcgccaggcattacttccatcaggtttaccggatgctctacataagtatccagcgggaagagcttcaggatggcatccaggatctccggaacgccatgtccgtcacagcggatggtgatggcattttttcccatggattctacagggaagtttccgtcagcgataacaagacggtcactgtgtcccatctcacataaaaccttcagtaattctggtgataagatttctggaattccttttaacatagtttatatcctcctaagatcattgtgtacttacagcatttcggaaattacagcatcaggctcaggtgatcagaacaggatacatggatttccgaaactgttatgacgccggtagtatcagacagacctgcccggccacaggctttagaactcttattaattaatctaacggtatttggtcttcttttcaagggaatattttcctgtaaatgatgaaaattttatggttgacagaaaccctgtggagcgctatgatgaactcaaacggaaacgtttcggtttctagatcaaatgagaaaataatacaaaacaaacacaatgattatgattccaaggaggagaagattatgccactggttacatcgaaggaaatgctgttaaaggcacagaagggcggatatgcagtaggagcattcaacgcagagaatatggagatggtgaaggcgatcatccaggcagctgaggagctgaaagcaccggttatgattcagacaacaccttctactgttaaatatggtacggttgagacttacgctgcgatcgtagcagcagaggcagccaaggcttccgttccggtatgccttcatcttgaccacggcagcagctttgagcttgcgatgcaggcaatgcatgcaggctatacttctgtgatgatcgatggttccaagctggattttgaggataatatcagagagaccaggagagttgcggatgtggcagcagccctggatatcccatgtgaggctgagctcggtaaggtcggtggtaaagaggatgatcttgaggctgaggcagacactaataccgacccgcaggaggcgaaggaattcgtggagcgtacaggtgttacttccctggcagttgccatcggaaccgcacatggtttctatgtgggaacaccggttcttgacaaggaacgcttaagcgagatccgcgaagtcgtagatatcccccttgttcttcacggggcatccggactcagtgatgaggatgtcagcgactgtgtaaaacgtggtatctgcaaggttaactttgcaacagagcttcgtgctgcatattccagggcagtgaaggagacctttgcagagaatgagaacaccatcgatccgaaggcctacggaaagaaagcgatccaggcagtgaaggagctggttgaggcgcgtatgaaggtttgcggctgtgatggaaaggcagaatgatcttctgtaaaaaaacagaaacggagtgatcagtatggcagcaaccatgaaagatattgccaggcggaccggacttgggctcgcaacgatttcttcttattttaacggcggaaacgtaagagaaaaaaacagaataaagatcgaggaggccattcaggagctgcattatgaggtcaatgaggtggccagagggcttaagactaatgctaccaagaccatcggcgtggtgatcccggagcttaacaataccttttgcgcggagatcatcacaggaatggaggatgtcttaaggagtcacggatatgcgactattgtctgtgactgccgtaccgataagagactggagcgggatgcagtggagtttttaagccggaagcgtgtggacgggatcatcagcatgccggtggatgcggaaggcaatcatctgaaaaaattccagaaaaccggaaagcccatcgtactcattgaccgcaggatccgggagctttcctgtgacagtgttcttgtagacaacgagaaggcggctgaggacgcaatgagagttttttttcaggcaggacaccgtaagatcgggatcattggcggaccggaggaaatttccacagcacaggaacgtctccaggggtaccgcaatgcatacgaaaaagaaaatataccggtacgggaatctctgatctatcacggcgattataccattcagggcggtgtgcagggaatagagaagcttgttgcggacaatccggatatgacggccgtgtttgttaccaactatgagatgaccatgggggcggtgatcgggatgaatgagctgggtcttaagatcccggaacagctgtctatgatcggttttgacaatctgcagtttgccagagcatgcaatcccaagcttaccattgtggcacagcctacacaggggattgccggagaagtggcgggaatcatgctgaaacggctggaaggggctgcaagtgaagaaacagaaccgatcacggagaagcttggcgcagagatcatcatgggaaaatccgtccgtgtgctggaggagaaggagaatctataatgaaaccatatttattaggtattgatatcggcaccagtgcctgtaaggttgcggtttttgaaaaatcgggaacggttgtggctgcggccaacggcgattatccggtttactatccgaaggagggctgggcagaacagaatccggaagaatggtggagtgctgtctgtcaggcggtaaagaaggctatccaaaaagcggggatagcacctgaggagatcgcaggcatcggtattgacggccagagctggtcagccattgccatggataaggacggaaatgtactgacaaacactccgatctggatggataccagagcacagtctatctgtgacagattgaatgaagagatcggggcagagcagatttttgaagtatccggtaattcccttcagccgtcctacacaactgcaaagatcctctggtataaagaaaatctcccggaggtgtaccaaaggatccacaagatcctgcagtctaacagctacattgcatataagctgacgggtgtgatgagccaggatgtttcccagggctatggcctacattgctttgacatgagaaaggcagcctgggatgaggatatgtgcagaaagcttgggattcccatggaatttcttcctgagatctgtgcctgtgatcatgttgtgggaacagttacagagaaggcggcggaggaatccggccttgctgtgggaacaccggttgttgccggtggtctggatgcggcatgcggaacactgggggctggagtgatccatccgggtgagacacaggagcaaggcggacaggccggcggaatgagcatctgcatggatgagtacaaggcagatcccagactgatccttggctatcacgtggttccgggacagtggctccttcagggaggaaccaccggaggtggtggtgtcatgcgctggtttgaacgtgagtttgcagattatgagcgctctgtagcaggggaaaaaggctcttctctgaaccagctcaatgagatcgcggaaagggtcgcaccaggcagtgacggagtggtatttcttccatatatgtccggtgagcgttccccgatctggaatcctaatgcgaagggcgtattttacggactggattttgccaagaccaagggacatatggtacgtgcctgtatggaaggcgtagcactttctctgaaacacaaccttgaggtggcaaaggaagcaggagcagatgtggaagttctccgtgcaatgggaggctctgcaaattctcttctctggacacagatcaaatccgatatcacaggaaaacccattgtagtgccgtcctctgatacggcaacaacacttggtgcagcgattctggcaggtgttggtgttggaatgtatcaggattatgatgaggccatccgtcttacggtaaaggaaacaagaagacatgaaccgaacccggaaaaccgggacgtttatgagaaaacctataaaacctatttaaatctctataaatctcttgaacctatgatgagaaatgaggaggaaaagtgatcatgaaagcagcagtagtagtagcaaatgaggatgttcaatatcaggaagtggaagaacctcaggtaacaccgggccatgtgaagatcaaggtaagatattccgggatctgcggatctgatatcccgcgtgtattaaatcacggcgtacatttttatcccatcgtgcttggacatgaattttccggcgatgtggtggaagtgggagaaggcgttaccaaggtgaaggtcggcgaccgtgtatccggtgcaccacttcttccctgtatgaaatgtgacgactgtcagaagggtaatttctctctctgcaagcattacagcttcatcggttccagagagcagggagcaaacgcagattatgtagtggttcctgagcagaatgcagtaccattcgcagacaatgttccatatgagcagggggccatgtttgagcctgcaaccgtagctatccacggtgtattccagaacgattaccacggcggtgagtatgtggcgatccttggcggcggtacggtcggtatgttcaccatgcagtggacaaagatcttcggctccaaaaaggtagtggtctttgatatcagcgatgagagacttgctcttgcaaagcgtctcggcgcagatgagatcatcaacacaaaggaagagggatatatggaaaaagccatggccattacaggtggaaagggctacggcttcgtatttgagacagccggacaggttcctaccatgcatatggcatttgagcttgcagcaaacaaggcacatgtatgcttcattggtactcctcatgaaaaccttacctttacaccgaaggagtgggagaacatgaaccgtaaggagttcaagcttaccggttcctggatgtcctacagtgccccgtatccgggacgtgagtgggagctgacggcgcattattttgcaaccggccagctgaagtttgacccgggcttcatctataagaaaatcccgatgagccaggcacaggacgctttccagctgttcaagacaccgggccttgtaaaaggaaagatccttctttccaatgaggaagactgatatgatcctgacagtaaccttaaacgctgccattgacaagcgttatgtagtggatgattttaaagtgggcgaagtgaaccgtgtgcgtgaatgtacctacgttcccggcggaaagggactgaatgtttccaagccggcgtccatttacggtgctgaagtggttgccaccggctttgtaggcggccacgcaggcaattatatagaagctgccctgaaaccctttggcattaagagtgctttttaccatgtggatgcggagagccgctcctgtatcaacatctgggatgaggtgaatcatgtacagaccgaattcctggagccgggatttacactgacagaggcagattttgagggctttgagaaaaaattccgccagcttgtaaaagacgcttctgttgtggcaatgtccggcagcgtgccgaagggacttgacggaagtgcctaccagcgcctcgtgaagattgtgaaagacgccggaaaaccggtgatcctggataccagcggcaagcttctggaagagggaatcaaggcagcaccgacactgatcaagcctaatattgatgagatccgtatgctgacaggcaagcattgtgacgatatcaacgatatcattgaagcagcgaaagccatccatgccggtggtgtggagatcgtggcggtctcgcttggtgcagatggttccctggcagtcggagaggaagggattttccgtgcggtggttccgaagatcgatgcggtaaataccgtaggctgcggagattccatgatcgcaggctttgcccttggattaagtgagggactttccctggaagagactctgcaaagagccagtgcgatctcagcggcggcagccatgcgtgaggaaacgggattctttgtgatggaggatatggaggctcttcttccgaagatcgaaatcaggcgtttataagataagcttataataaaaaaatttttataaaaaaggagatgtaaagatggcagaagttatcaatccggcaattgtgccgaaagtgacacttccttccggcgagcaggttccgtgtgtcggaatgggaacattcggttccgaccgtgtatccgcagaggatgtatctgcagctgttgcaggcgcgatccgcagtggctaccgtatgtttgactgtgccgcatgctacggaaatgaacatgagatcggccaggtatttaaggacgcttttgacgaaggtgttgtagagcgtaaggatctttttatcatgacaaaggtatggaatgacatgcacagaagagtagaggaagcctgtgacaagagcattaaggatcttcagtgcgattatgtggatatgtatttcatccactggccattcccgaactatcatgcaccgggatgtgatgtggattccagaaatccggattccaaacccttcagtgtggaggagtttatggatacataccgtcagtgtgaggcgttggtagaaaaaggaaagatccgttacatcggtatttccaatatgaccattccgaagcttgaggcagttcttccgcttatgaagatcaaacctgcaacctgtgagcttgagcttcatgtatgcttccagcagcaggagctttatgattatctggtagagcataacatccagccggtaggctatatgccaatcggttctccacgcagaccggagagagatatctgcccggaggatgttgcggatctggaggttccggagatgcaggcgatcgcaaaggcacatggtgttcatccggctctgatcgctctgaagtgggcacatcagagaggagagatctccattccgttctctgtgcacaactatgcaagcaacctgaaatgtgtcacagaggatccccttacagagaaagaaatggcaaccatcgcaactctggaaaaaggcaaccgtcttgtaaaaggacaggtatttctgtggcatggtgcaaatgactggcatgacctctgggatgaggatggcgttatcgtaaaataataaaaatatgcaggaaaatcccgtatcccatatgttggatgcgggatttctttgtatttaatttggactaagaaactccgttgtaaattttaaccaaacatgttaacatataaaaagaattaatagttattgtttacagaaaggacagtaatcttaccaatgaaaatgacagagacgggggaaggatctgtcagggggatgtgcaataaaaacaacagaaactgatcagagggggacaacagaaattatgtatcgtattttactggtagatgatgagatacttgttcgagatgcgatccgggagaatattgactggaaagcaatggactgtgagctggtaggagactgtgataacgggaaagcagcagcggaatttgtacagaaccatccggtggatatcgtgcttacagatatccttatgccatatatggatggtatggaactgagccgttttctccatgataattatccggacatcgtgatcgtgatcttcagcggatttggagaattcgagtatgccaagaaggcaatccagtatggtgtcagtgaatatatgctgaagccggtgacagccatggaactcagaaatgttatcggaaaaatgaaggagaaggtggaccagcaaagaaaagaaaaagagaagctggaacgtctgacacagacttccgagaattatcagaaaaacgccattgtgatccgttccagagcgctgcagggctttgtggataatatcaagacacggcaggaaagtctggaagagcttgcagcactgggaatcgatcttgaggcagcatgctatcgtgtggctgtttttgatctggatctgtattcggacggcagtcagcttactgcggagaaacgccaggagagtgcactgatgtcttttgtcctttttaatatcagcgatgagatcatcagcaaagaaaaagcaggagtggcatatcaggccggaaataacaaggtcggtgctcttttcatgggaaaccgtaccagagagtttgaacacaagatcatggagatctgcaggacgatccaggataagctgaaggaactgatgtcgctggatatttctatcggtgtgggaagctgggccagaactcagcaggagcttcgtgtatcccatgaacttgcagagaaagctattgaatatcgttatcttcttggcggaagccttcttattgatatggaagaacagccggaggaaaaaaatctttccattaaagcttatgtagagaagctgccagctgctctgaaagcgggtaaaaaggaaaacgcagagcatattctggaacagatctcttctgagatcaaggaagcgcgggtggataagagtcgtgcctgcgtgtatcttcagcagatcatccgtgcagcagatgaaacctgtgaggatatggttccggacaacaggcttttttccaaaagagaagcacttctgcagcaggttacggagcagaattcttttgacagtgctgttgaactggtcaggaatcatatcggagagattttccagacactttccgatgcaaacagctccagcggacagcgtcaggccagacttgccctggattatatccagaagaattatatggatccggatttaagcctgaacagtatctgttcctatctgaatatcagtacaagctatttcagtacgatctttaaggatcttacgggagagacttttacagaggttctgatccgtacccgtatggagaaggcgaaggaacttctggagaatacaactatgaagaattatgaaattgccgagaaagtcggatttgcagatccccattattttgggatctccttcaaaaaaatgaccggctgcacaccaacagaatatgcaagggagaaacgtaaatgagagatatccggtttgcggcaaagatcataggaaaatttaagagtatccagagtgcgatctttgcggtagtgacggtgctgcttttaagtgcggtgctggtcataacaggtgtttccatgagatatacccgcaattctatttttgaaaattctgctgtctacacccagaatatcgtgcagcagatgaatcagaatattgattcctatattgattacatggaaaatatagcctatatgatctccagtaacgaggatgtacagcaatatctttttggtgaaaatgtggacaatggaacaagagagcgtctgatcaatcagttcaagactattctggatggacgaagtgatatccgaaatcttgggatcattggaagtaatggacggaagctgatcaacgacggcaaacagtctgtgaatccggatctgaagctttccacccaggagtggtatctggaagctttacagaagccggaaggcccgcttcttacatcttctcatgtacagcacatcatcagcggagagcgtccgtgggtgatcactttaagcagggggatccgtaatttttccaacagtggtgagaaagagggagtcttttttattgatctgaattacagtgccatcagtgaactttgtgatcagaatacgatcgggaaaaagggatacgcattcattctggatgaaagcggaaatattgtataccatccccaacagcagcagctttataatgaattgcagactgagaatatcgacctgatcgtgaaatcaaaagaagatacggtgcgtaccgaaaagggaaatagaggaaagctgtattccatttccagatcaaataaaaccggatggaccgttgtgggctgtatgagcgtcagcgagcttctgcgcaaaagcaatcaggcacagagtatttatgtgcttatttccgcacttctgatgatcgtggcactgcttttttccagatttctggcaaagagtcttacatatcctcttcagcgtctcagagattccatgtccagagtgcaggaagggcattttgacggagcagatgtggagatcgattcagagaatgagatcggaagcctgacgaaatctttcaatgtgatgacacataggatacaggatcttatggagcagaacgtgaaggaacaggaagcaaagagaaaaagtgagcttaaggcccttcagtcccagatcaatcctcattttctctacaataccctggattcgatcatctggatggcagagggcagaaagtacgaagaggttgttctgatgacagcatccctggcgcgtcttcttcgtcagagcatcagtaatgaagatgaagtggttcctcttgcaagggaagtggagtatgccaagggttatcttacgatccagaagatgcgttacaaggacaagctggaattcgagatcgatgtagaaccttctatattaaatatccctctgatcaagctggttctccagccgatcattgaaaatgccatctatcatggactgaaatataaagagagtaagggacttttgcaggtaaaaggctttatgaaggacggaaatgcagttcttcaggtgatcgacaacggtgtaggtatggatgaggaaacattgtcacatatttatgataagcataaggtgaattatcattccaatggtgtgggtgtttacaatgtacagaaacgtctgaagctttattatggagaaaattacgggatcacctatgaaagtgaaaaaggtgtcggaaccactgccacgatcaccattccgggaatacaggaggaatcaatatgaaaaaacatagaaaactcctgactttaggagtggtcatctgccttgtggcggggcttgtagccggaatagtctattataaacaggtagaagaagagagaaaactatcgctgatctatattccgaaggttgtggacggtaccaacgatttctggacatcactgatccagggggcggagatggctgcaaaggaatataatgcagatatccgcgtatgggcacctgaggaagagaatgatgtggctgggcagaacaagctgatcgaaagggcaatagaagaaaaaccggacgcgatcctgatctcgccgtccagcttcactgaatccgaccagcttttgaagaaggcaaaggaacagggaatacatatcgcatttattgattcctacacacaggaagaggtccaggatcttaccgttgcgaccgataatctggaagcgggacagatccttggcaggtttgcgaaggatcttgtgggaacggatgatcagattgcgatcgtttcacatgtaaagggtgtatctacggcagttgaaagagaaaaaggtttccggacaggacttggcagtctgaaggataatatcgtagatgtggtatactgtgattctcagtatgacaagtcctatgagcttacaaaagagctgatgaaaaaatatccggatctcaagatgatcgcgggaatgaatgaatattcctctgtaggtgctgcaagagcagtaaaggcagcaaaagcagagaatcggatcagggtggtgggagtagacagctcacaggaggccgtccagctgatggaacacggaatcttccagggaatcgttgtacagaaggcatttaaaatggggtatgtgggtgttcgggaaactgttaagatgctgcgtggagaagactataagaagaatattaattccgggtgccagctggtgactcctgacaatatgtataccagtgagatcgaaaaactgcttttcccgtttaatacgttaaaaacatatggtgatcttacaccgtaaatagtcataaatgcacaaagaaaagggttaaatatttaccatacagtaaatatttaacctttttttgaaagatattctattacaattattgatttttgacggtattataataaccaagaaaacacaagatacgtgcaaaacgtgaggagggtaaaaattggaaaacttaaaacaaaatccaatcgttaagaagctcggattgaacagaatacttcttgtctgtgttctgattcttatgttcctggtttttaaagtagttcttggaaacaagtttccggctgttgatagtatcaagtctactttgaactatgtgtacttcctgggcttcttgtcacttggcgttacattcgtaatcgctacaggaggaattgatttctccatcggacctgtaatgttctgctgtgcactggtatccggttactgcatgacatcttacaaggttccctgtgcagttgccatgatcctttgcattctgatcggtctctgctttggtattttcaatggctggatggtttcttacatgtcagtgccaccattcattatttccatggcatccatgaacattgcaaaaggtattgcttctgtattcacaaaaacacagtctgtaagctggccggcagccagcgatgcaaacggctggttccgtaatatcgtttctgtaaacggcttccctgtaggaatcattatcttcctgggaatggcagttatctgcggtatcgttctttacaacacaaaaccgggacgttacatcctctgccttggttccaacaaagaggctgtccgcctttccggtgttaacacaaagaaatgggaaatgcttgcttatgtgatctgcggattcctggtaggtattggagcactcttctttgtagctacatacacaactgttcagcctggttatggcgatcagtacaacaatgaggctattgcaggctgcgttatgggtggtacatccatggttggtggacttgcttccatcggcggtactgtaatcggcgtatttatcatctctcttcttcagcagggcatcatggcatttggccttggtaaaggacagcagatgatcatcacaggtatcatcgttatcgttgcagtttatatcgacgtttctgcaagacgcagaaagaactgatcttagagggaggatgcgacaatgggtgaagttattttaactatgaaggacattgataagtcctttcctggagttcatgctctggatcacgttaatttcgaagtaaaacgcggcgaagtacatgcacttatgggagaaaacggtgccggtaaatcaacactgatgaaggttcttaccggtatttatcagaaggattcaggttccatcgtttacaaaggacaggaaacagaattccacaatacacgtgaggcacaggatgccggcgttgtaatcgtacatcaggagctgaacatggtaggtgatcttaccgttgctcagaacatcttcatcggacgtgaaccgaaaaaaggtttccgcattgatgacaaaaagatgatcgaggattcaaagaagcttttccaggatttgaacattgagatcaatccgaaggaaaagatgaaaaacctgacagtcggaaaacagcagatgtgtgagatcgcaaaagcaatctctcataaagctgaggtcatcatcttcgatgagccttccgcagcacttaccgagaaagagatcgcggatctgttcgagatcatccgtgaccttcgtaagaaaaatcttggtatcgtgtatatctcacaccgtatggatgagattaaaaccatcacagaccgtgtaacagtcatgcgagatggtggttacgtaggaaccctcatcacaaaagacagtacaaaagaagatatcatcaacatgatggttggtcgtgttatttatgaggatccgaagcaggagagtgcggttccggcagatgcaccggtagttcttaaggttgaacatctgaacgcaggaaagatggttcaagatgtaagctttgaactgaagaaaggtgagatccttggtttctcaggactgatgggcgcaggacgtaccgagacagccagagcactgttcggagcagatccgaagcagagtggtaagatctccattatgggtaaagacggtcagcttcatgaggtgaccatcaacagcccgcaggatgctgttaaatgtggtatcggttatctgtcagaggacagaagaagatacggctgtgttgtacagaaatctgtaacagagaatacaacactggcaacaatggaagagtttaccaatggtatctttatcaacaaagcaaaagagaaaaaagttgctgagaaatatgtaaacgaacttgcaactaagacacctactacagaccagctggtagttaacctttccggtggtaaccagcagaaggtagttatcgcaaaatggctgacacgagacagtgacatccttattttcgatgagcctaccagaggtatcgatgttggtgctaagaacgaaatctacaaattaatgaacagactggcagcagaaggaaaatccattatcatgatttcttctgagatgacggaagttctccgaatgagtgaccgtatcatcatcatgtgtgagggtaaagttaccggatgtattgatatctccgaggcaacccaggaaaacatcatggacaaggccacacggaatatcgattaaggaggaaagtcatgactaagaagaaaaaaagtattttaagtgatcagagatttattgttttgctcgttatcattgtcctgtgtgcaatattctcaggcttgagtaaagaattcagacagtacaccacgatcctgagtatgctggatttctcatattacgatcttcttatggcgatcggagttacattcccgcttatcactggtggtgttgacctgtcaatcggaactggtatggtagcttacgcactgatcgcaggaacactgatcagaaacaacaactgcccggtagcacttgctatgatcatctgtatcgtacttggtatcgcagttggtgcattaaacggtgtacttattggtgttatgaacctgccgccattccttgcaacgctttgtacatgtatgattacccgtggtgccggatctctttgcagtgcaacaccttggccgggacttacacagccgggtggatggttccacagcatcttcaaggtaaccgttggtacaggaagaagtgcttcacgttatccgctcggtttcctgtggatgatcattctggttcttcttatggagtacatcctgaaccacaccaaattcggtcgttacacaattgcaatcggttccaacaaagaggcagcagccctttctggaatcaatacaaagttctatcacgtaatggtatacgttgtctgcggtctgtttacaggtcttgcagcaatcgcatacgcagcagtaacacctactgtacagcctggtactggtgccggacttgagatggatgctatcggtggtgtattcgttggtggtgtagcagctaccggtggatatggttccgtgatcggtacattcgttggtatcttcgtcatcatgcttctgaaaacaggtcttccatatatcggcctgcaggcaaactggcagcagatcatcactggtatcgttctgatcgtagccgttctgatcgatatcctgaaagagaaaaaagcagcacactgatattaagaagtgtgtataataagtaagggtgctgtttacagagaaatgtgaacagcacccgataatcaaagatgtgaaacgccaaggggtagcaacggcgtatgaacataaaaaactatataatatattttaaggaggaaatattatatgaaagcaaaaaaggttatggcattaatgctctgtgcagcaatggtaacaagcatgagtgcaactgcagcttttgcagctgaggagaaagaagatgcagcaacagagaaatctgcagattccacagcagctgaggatcctactgcacagttcgacggactgaaagcaaacgaagcttatgtgttcccgatgatggttaaatctttccagtccacatactgggatgcagctcaggaaggtatgaagaaagcatctaaggagctgggcgttgattataaaccacagggaccgaacagtgagtccgatatcgctgaccaggttaacatgatcaacacagctatcgcttccaatcctgttggattaggacttgcagcttgtgatacatcttccgttacagatgcacttaagacatgtgcagaaaaaggaatcccggttgtaacattcgatacaggtatcgctgatgctccagagggatctgtagtatgcgaggtttgtacagacaacgcacaggctggtgcagtagcagctgagaatatgtacaacagcattaaagacgttgttaaagatgctgacggacaggttgtaatcggtgaggttaaccaggatgcaacagctcagaatatccagcagcgtggtacaggattcatcaacaagatgatcgagcttcttcaggctgatggaaagacagttgcagtaagcggcaacgagttctatgtaaacgcagcagagggtgctgacgcagacgctaaagacgctgacgttgttatccaggtagctgttccggcacagacaactgtagagctctgctccacagaggcacaggcaatcctttcccaggagaactgtattgcaatcttcggttccaaccaggtttccgcagagggtgttcttgcagcaaatgctaaccttaacgttcttggttctgacccggcaaacggtgatgtagttggtgttggtttcgatgctggttctatcatcaaagcagctgttaaagatggcacactcgttggtgctgttacacagtctcctcttatgatgggatactatgcaatctacgctctgacagcagcagcaaacggccagaagcttgaggatgttcctacagagggttactggtatgatgcaacaaatatggaagacgagaatatcgctcctaacctttatgactaatcaaatcatataattgataagatcgtgaagttataatgaacgcggattgcgttcacggacgtatgaaataagagatccgctggctgattcagtcagcggattttttaaacaaataatgtagtagttcataaataatcgctgtattattggcaaataaagacactttttttgacaaaagaggttcttatcaccggaaggatcctgatgtatgataaatacaacatcagatatgaaagtgatcagaagcttacatattgaggaggatttaaaaatggcaacatattatttagcagtagatatcggagcatccagtggacgtcacattctgggacatatggaaaacggaaaaatgatcctggaagaaatctatcgttttgagaacggcatggttaagaaggatggagagctctgctgggagtttgaccgccttttcaacgagatcgtaaatggtcttaagaaatgtaaagagatcggcaagatcccggtaagcatgggtgttgatacctggggtgttgacttcgtgcttctagacaaggatgacaaggttcttggcaacacggtaggctaccgtgatcatcgtacagagggaatggacgaggaagtttataagacaatttccctgaaggatctgtatgcaagaaccggtatccagaaagcgatctataatacagtatatcagctgatggcagtgaagaagaaacatcctgagtatctggagcaggctgagacacttcttcatgtaccggactacttccattttcttcttacaggcgaaaaaacttgcgagtacacagaggcaaccacaggacagcttgtatgcccgacaaccaaggactgggattatgagctgatcgatatgctgggatatccaagaaagatattccagaagctgatcatgcctagcacaagcatcggacatttaacagacgcagtgaaggaagcagttggctttgatcttgaggttgtagcaccggctacacatgatacagggtctgcagttctggctgtgcctgcaaatgatgacgatttcatttatatcagttccggaacatggtctctgatgggaatcgagagaaaagaagcagactgctctgagaagagctgtgagatgaacttcacaaacgagggtggatatgcaggacgtttccgttatctgaagaacatcatgggtctctggatgatccagtctgtacgtcatgagtttgatgatgcgtacagctttgcacagatctgcgagatggctgaggaggcaaaagacttcccgtcaagagtaaacgcaaacgatgagtgcttcctttctcctgagaacatgacaaaagaggttcaggactactgccgcagaacaggacagcaggttccggaaactcttggcgagattgcaaccgttatctatacaagccttgcagattgctacgctaagatcgcaaaagaaattgaggagatgacaggaagaacctacagccgtatccatatcgtaggcggtggttccaatgcaggatacttaaatgagctgactgcaaaagctacaaagaaagaaatccatgcaggccctggtgaggctactgcaatcggtaatatcacagcacagatgctgaaggccgaggagtttaaaacgatcgaggaggctcgtacaaccatccatgagtccttcggtatcaaagtatacaaagcataaataaaaataactggaggttttattatgttagttaacacaaaggcaaaagttggtgtattttcaattgctttaggcgcatatcttccgcagttcccgtcactggtgccggaatttgaggcacagtacgacgcattcaagaaaacgatcccggatacagtagagatcgttgacggcggaatggtgacaacaaaagagcaggcaatggtggcaggagataagttccgtgcagcagatgttgaccttgtatttcttcagatgctgacatacgcaacatcctacaacatgcttccggcgatccgtgatctggatgttccggttgttcttgtaaacgttcagaagatcaaagcgctggattatgagcacactgacattgcctcctggctgggtgaaggctatgcatgcggtgctgtaggcgaggcagttgctgaccttgagagagcaggcaagagacatgcggttatcacaggcgttgtagaaggcggagatcctgcagttcaggctgagatcgaagactggtgcaaggctgctcaggtaagaagaagattccgtgagactaacattgcgcagatcggaagaccatatccgggtatgatggatctgtatattgatgagacaaacctctataacagaatgttcctctacacaaaacagttcgactgggagaagatgtgggcgatcgctgatgatattacagatgaggaggcaatccgggcaaaagcacaggatatccttgatacattcgatattgagggcggcggcaccattgagaaagtatgggatatggcaaaatatgtagttgcttttgaggagtgggtaaaagacgagcatcttggaatgatcgcttcccattacgacggatttgcacagggtaaagcaggagtccttgacagtatgctgatcccggctttctccatgctgatcaaacagggtactgcatgtgcggtagagggtgacatgaaggttgccatggcaatgagtatcttaaagacaatttccggtacaggccagctttctgagatgtactccatcgatttcaacgatgacatctgcatcatcggacattccggaagcggtgacgctgacatctccgacaagaaaccaaccatgaaaatcgtgccggtattccacggcaaaacaggcggcggatacctgacacagttctatccatacacaggccctgtaacctaccttgcaatcactcaggataaagacggaaacttcaaattcgttgtagctgagggcgtaaacgaggagggaccgatcctttccttcggtgatacaaacatgagaacacgcttcacatgcggagcaagagagttcgttaaccgctggagcgaggctggcccgacacatcatatggcagctgctacaggaagacacatcgatacgatcctgaaggttgcaaaaatctttaacgtaccggtagatatcgtgacaagataaattctttcttatgtattcaacctaaaacatattcaaaaaaggagactgcgcggagcggtctcctttttcagtgggaaaaataagataaaaaagatctgccggaaatgcagcaggcagattcggcagattttggttttgcagttattttttatgcataagtgtgtgctccctggaaagctcatcgtgcagctggatggaagaccagtgctgagttaccggtgtgagcatggccttcagtgcaacaggcgggatctggttttcacggaaaaaagcaagaaaatcatccatctgtgcactggaaaaatccttcagcacgatcatctcatcactgaaattgcttcccagattaaactgggatgagggatgaaatcccggaatctcaaaaagatatcccagcggatgaagaaattccggcgcagtgacgatccgtgtcttaaccttctgacggttcagatagcggcggatctggcgaagtcgttctgggtcgttaaaattatataaaagagcttctggctgtgtattcatatagtgtcatacctcatttctgaataaagatttttgtggaacataagttacttttcgcgatgtgcagggaagcggatctcaacctctgtcccctctccaggcttgctggaataagtgagtccgtaattatttccatagagaatttggagtctccggtgggtattataaactgcgatatttgtgccgccggactggctttttccctttccggaaaggatagttgacaggatttccggcgaaatcccaacaccgtcatcggaaatcagaagaacaatatcctcattttccatccatccggtaataacaatagttccggattttgattctttttccaggatcccgtgaagaatggaattttccacaacaggctgaagagtcagcttcgggatctggtattctgaaagctcatccgggatatccgtgatcagctcaatgctgtcgtggtagcgcatattctgaagctgcacgtagatggttacatgctccagctcccttgcaatggtagagattccttttttgcggctcagagtcagcttataaaaacgggaaagactttgcactgcgtgactgatctcatcggtctgtccctgcagtgccatccagttgatcatatccatggtattataaagaaaatgcggattgatctgtgcctggagggaattgaattctgcaatccggagatcttttgcagccttagcctgcttctccatcagttcctccatttttcgagtcatatagttgtaggtatcgataagattaccgatctcatcatgtgcctgtggactttccataggagtaggcgggccgtggcggacggtctgcatctgccggatcacagaagaaagtcttccggtaatggaatgagccagtacattggcaaaaatcagagccagaaccagaaaaactgcatagatcagtacgatctggaccatcagtcggttgctcgcatggatcagcggcggggaaggaaggaccgtcaccataaaccagtccgtattggaaatgctgtaaaaaccggcataaacctttgtgtccagaatgttccgctcaatgaagttattggaagacataaaggaagccttgatggtgtcgtaatccagttggtagattccggataatgacagatctgaggtagcaacaatggcatcacgttcgtttacaatatatgaaacacttccttccagagatagattgtcggaaagaatggaagtaagcttgtcatcggaataatacactgccagataagccttataggcagtggagtgataataaaggcttaaagggcagatatatgccatatcaccataattctttttttccctgggaccaagatagaaggaaggacagaacatttcctgggtgttccggtttccctgaaagataccgtaccagtaggtacctttcgcctgacttaagggagcaaggatattcttagtgttgggataagtatccagtgtcttcagatcatcaggaaaatccacatagatctgtacatcggtaacaatggaatctgtggtcagacgctgaacggcatttttaaaatcagtggcatggttagatgttgcaagctgttctgctgaatcgctgaccggcatataaaaaagttcctgaaaaaaattctgtcctgtaatattccgggtagtagcgaggatcgtatccatagtccgttcgatcagaggtgcagtttttgcggaggcgtcctgttcctgccggatggtattggaaaccaccatgctataaagtcgtccataaaaaagaaaggcggtaagacaggcaggaattaccacaatgctgatcagggcaatggtgaattttgtctgcaggtttaaattcaggtagccgtttttgaaacggcgccagagggccctcatgacattttctcccggtattcagacggggaaaagccggagtattttttgaagctttttccgaagtaattgccatccgtatagcctaccttggaagaaatctcggaaatcttgtatttgggatcggaaagcagctgcttggccttttccattcggtattctgtcagatattgattgagagtctgtccggtctcacttttgaaaaaagtgcatacataagatgcggaaaggtatacatggccgctgatatcttttacggaaagtgtatcgttcatatagttccggctgatataatccttgatcataaagatcgtggaattttccggctgggaatttttcgcatcttcaaaatactgggcggttttttctttcagagctttgtgaagctcttcgtaggtgaaggcgttgtttaacgtatctacgatcagatcctgcttttcatgaagttcggtttccagctgattttttttacgggaagccgaaagtgtattaaatagctggtaataaagatcacggatctggttaggcataaatgtgtgattgcagctataataccggaaaagctcatcaagaaactgaaaacagggttcttcttctccggccaggagatatttggaaaaagtattttccggtgaatgcagggaatccggaaccggtcccttcggtgaaagcaggcggatggaattttccgtcagaaatgttttttccggaaagaaaaaacagttctgcagaaggatcacggcagaagcgtaggactgataaaccctgaaaatatccgttacggtatttccggcagcgatcagatgctttccgcaggtgtcatattgtctggaaatatagcttcccactgcggaaagggtagtcggggaaagggcattccttccatatatatatggtggaccagatactgaactcttttttccacaaaaagacatttcagatggtaatgctccagaaaacaggaaatgtcgttctggagatcttccaggaaaataccggaagcctccacagattcattaagctttacgatcacagaggtaaaattcatgccgttctcaagaagctccggctgccccagttccagacagagatctgcaattttgttgttatcggaaggtggaagagtcagctgttgtgccagccgggtagcgatttcctgagaatggatcgcttcgccacgatgggagcggagcttttgtttgtaaagagtctgcgcttccagaactgccgcctgtacttcctcgggatgcagaggcttttcgatgtaattgatggcttttagtttgatggcagctttcagatactctttgtcagaatatccgctcataaagatagggatactgtccggcaggaatttctccagacgctccagcatggcaatgcctgtcatccgcggcatccgtacatcgcagagaatgatctcaggtttatacagtctggccatttccagtccgttcacaccatcatctgcctgaaggatctcggtgattcccagagaatcccagtcgatagatgagatcagtccggtacgcgtaagttcttcgtcatcgacgatcagtaatttcatatacaattctccaatcgagcatagctttatagcttcgtaaatcggacgtttacagctctgtttatattcccagaaaactgtaacgtcagcgttatcattatagcataaagtatatagaaatacgagaatgggacaatggtttatgagtaatattttacagggaaaagaagaatattttacccttatccaaaaatattcccattatcaatctgtgggccggatgatagaatataatcagattaaaggaaagggaggagaaagagccgtgtcagaatatgttcttgaattaaaaggtattacgaagatattccccggtgtcaaagctctgaataatgtacagttccagctcaaacctggcgaagttcatgcgctgatgggtgagaatggtgctggtaaatctacgtttatcaaggttattaccggagtacataaggcagaagagggtgagatgttcttaaacggacagaaggttgacttcaaaggtccgaaggatgcccaggaggcaggtatcgctgccgtatatcagcaccctacatcatatccgcatcttacagtagccgaaaatatttttatgggtcatgagatcattaaacatcatatgatccagtggaaagagatgaatcaggaggcaaacaagtacctgaaggagctggatgcagactttgacgcaacagcagagatgggtacactttctgttgcacagcagcagatggtcgagatcgccaaggcactttccacaaatgcgaagatcatcattctggatgagccgacagcagcacttaccagaaacgagtcagagaagctttacacactggttgacaagctgaaagagaatggtgtttccattatctttatctcccatcgtttcgaagatatgtaccgtctggcttccagagttaccgtattccgtgattcccagtacattggaacctatgatgtagatggaatcacaaacgcagatctgatcaaggcaatggttggtcgtgagattaacgatctgttcccgaaaccggaagtgaagtttggagatgagatgctccgtatcgaacatctttccagaataggatttttcaaggatgtttctttcaatgtacatgcaggcgagatcgtaggtcttaccggtctggttggtgcaggacgtacagaggttatggaagctgtctgtggaattacccgtccggacgaaggaaaagttttccttgagggaaaagaaatttatatcaagactccgtctgatgcaatggaaaaaggtatcatccttcttccagaggacagacagaaacagggtctggttatgagctggggacttggaagaaacgtaacacttccgatcatcagcaaatatgcaaaatccggatttaacgatgagaaggcagaaagagaactttccaagaaacttcttgaggaagtagataccaaggcagtcgatatcttccagccggcaagctctctgtctggtggtaaccagcagaaagttgttgttgcgaaagctcttgctcaggaaatgaaagtagttatcatggatgagccgacaaagggtgtcgatgtcggagccaaagctgagatttatgcgatcatgggagaccttgcaaagaaaggatatgcaatcatcctgatctcttccgagatgccggagatcctgggtatggcggaccgtatcattgttatgtgtaatggccgcaagacaggagaactgaacagaggagaggcaacacaggagggaatccttgagctgtccatggaaaagagcactggaaaggggactaaataatggaaaagaaatctgtcatcaagaagattacaggctcccgagaggctctgctggcaattatcgtaatcgtgctgtttgcagttgtcacagcgatcagcccgtcattccttacgccaaagtcactcatggagatgctgaaaaataatgcagtaacaatggtaatgtcacttggtatgttatgtgtcatgctggtaggcggaattgatatttccattatgtcaactctggcactttccggtatgtccatcggtatgcttctgaaatacggacatatcacaagcacattacttgctttcatcattgcaatggcaatcggtattgcctgcggactggttgtaggtcttgtaatttcaagagcaaacgttccgccgatcattgcaaccatgggctttatgtacatctacagagcaatgggatatcttgtttctcacggtggtgagtgggcaagtgccgcagctctcggtgattttaagaattttgccaccacaaatttccttggaatcaacaaggtaatctgggtgatcatcgtatgctacgtagtattcttcttctttatgaaatggacaagaaccggtcgtaggatctacgcagtaggaagtaacgcaagtgcagcacaggtttccggtatcaatgcaaagaatatcaaccttcttgtatatgtgatcatgggattcctcgcaggtcttggcggagcacttcaggtatctgtttatgcttctgcaatgcctgatatgcagtacggtggtgagatggatgttatcgcagcctgcgttatcggtggtgtaagcatgagcggtggacgtggaaccgtagtaggtgcattcctcggttccattatccttgcaacgatcgcaaaagctcttccgcttgtaggtatcagttcactgtggcagaacatgatcaagggtgttatcatcctggtagtagttgtgatcaacgttgttctgcagagaatcgcagataaaaacgcattaaagggaagggagatgtaaatcatggctggaaaatctggaagaagtattaacaatgtgccggaaaatccgatgaaacacatcatattcagttgggaaggcatcctggtcattctctttatcctggtaaatattttctgcgcatcattttctgagttttataatatgaagagtgttcttcgtcagatgccggtttaccttgcagaggtattcatgatgtttccaatggcgtacatcctggtattaggcgagattgatatttccgtaggtgcgatcgtgtgtctctccgctaccttaagctgtatggtctgcaacacaaacgctccgttcattgtagtagtacttacagcactggttgttggtgccctctgtggtgcggttaacggatttatccttacccgtttcaaggagctgcctccaatgatcgtaacactggcaacacagatcatcttccgtggtatcgctgaggtaacacttggagccggcggaagtattgcgatcacaaaaacagatggcttccgtgctatcggtggaaaggttggaaatattccatatattcttttcctggtgctgatccttggtgtactttttgcgatctttcttggaaagagtacatttggacgccgtacatatgcgatcggaacaaaccgtgtggcagcttattacgcaggtgttcacgtagagaagatccgtttcatcatctacacagttatgggacttatgtccggactttgcgcagtattcctggtatcctcttcctacggtgcaaatacaacaaccggtaacggatttgagatggatgccattgcaatggcagtattcggaggtatctcctccacaggtggtaaaggtaacctggccggcggtatcatttctgcattcatcatcgtatgcttacgagttggccttggacagaagaacgtaaatgctcaggtgatccttctcatcatcggtgtacttctggtagcagcagtagctcttccgaatatcatcggcgatgtgaaaaaagcagtcgcaatgaagaaaaactaatatcacttttgaaacccatatgattgttagctgtctccattggtgtagcggaggcagcagcatataaaaaaattatattcttatagggaggaacaacaatgaaaaaaaaggtaattagcgcaatcctttgtggagcaatggttcttggtacagtttgcccggttcttgcagcagatgacaaatccgaagatactaagacagaagcagcagctggcgattccgcaaaaggcaaaaagattgctctggttggtaaagcagccggtaacgcattcttcgagatcgcagcgaaatctttccaggagacagtagaggctgaaggcggcgaggttcaggtcgtttatcctgagacagctacagctgatgcacagatcaaggttcttgacaacctgatttcccaggactttgatgcaatctgtatttccgctaacgatgttaacgctcttcaggctaagcttgaggaagctatggatgagggaatcaaagtatcttctttcgattctgcaccgaacaaagacagccgtgagattttcgtaaaccaggctggtacaaaagaagttgctcaggcacttatggatgcagttcttgatatttccggtggtgagggacagttcgctatcctttccgctacatctcagtccgctaaccagaacgcatggatcgatgcaatgaagaccatcatggaaggcgatgacaaatacagcaagcttgagcttgtagacgttgtatacggtgatgatgagccgcagaaatccacagaccagacagcagctcttcttcagaactacaaggatctgaaggttatctgcgcacctacaacagttggtatcgcagcagctgctaaatatcttcaggataacggatcttcctgcaagctgacaggtcttggacttccatccgagatgcaggagtacacaggtgatgatgattctcattcctgcccatacttctatctgtgggatatgcagggccttggaaaactcagtgcttacacaacaatcgctctgatcaacgaagacatcacaggtgctaaagatgacaaattcacagctggtgaccttggtgactacacagtaacagaggcagatgacggcggtacagaggttgttcttggtgcacctctgaaattcgatacaagcaacatcgaggagatggctaagctgtactaatcaatcctcagattgactgtataatcatatgataaatcctttcgggacaaggcggagtcttcggactccgccttgtttcgtatatttgaatttggtgtatagaaggtttccgaaaaaatttcagtcttttgattctggttgtactcttatggctgcggtgttaaaatgaggacagcagaatagaaaaccatgaacagatgaaggagcaaaacacatgcagcaggcattactggatcagctgagaaagatcacagaggaagagagaaaaatcctggatggagaagcagaggtggatagagatctctacacatccggtcgggactttactgtggacagccgtaaaatgctgaaagaaggcaggctgatcgctgtgcgtacacacacccgttttgtgtattttccggctcacaggcataattttgtggaagtgctgtatgtgtgtgagggatctctgactaatatcattgacggaaaaaaagtcatagttaacaaaggcgagctgctttttctcaatcagtttacgaagcatgagattctgaaagcggggcagaatgatattgcgatcaattttatggtgctgccggagttttttgatgtggcctattccatggcgggcaatgacaatatgctggcagattttctggtgaatgtcctgcgacaggatgaagagcgtggggaatatcttcattttaaggttgcggaagtgctgcagatccagaatcttctggaaaatatcatctattctcttgtaaacggtgaggagaacagagagcggatcaatcagaccacaatgggcctgatattcatgtatctgatagaatcggtgcagtatgtggagatgcgtctgcccaatcagtacgaaaatatgatctctatgacaacactggattatattgaacagaaataccggactgctacgctgacggagctttgtggtcgtctgcatcttcccatgcatgtcctcagtaagatgatcaagaaaagcacagggtttaatttcaaggaacttcttcagagaaaacgtctgaacaaggctgtagagctgatgtgtgaaacagatctgcctgtcagtgacatcattgcggctgtaggctatgaaaataacagttattttcatcgggtattcaaggaacattatcacatgacaccacgggcgttccgggtcaaaaacagtgagaaagaacaggtgaggctgtaacagcctcacctgttttttaaatatcatggaattgtccgatcttgtttttgatccgctgcatttcgttatccatatcgatcacagcgcgggcgcagttcagcagctcattgctgacatcctcataaccgtccatttcttcgatattctgcttgtaacgcagctgatgctccagagttgcccagaaatccataccattggtacggatctggatctctgcacgcatgggagtttttcccttggagaagaatacggggatttccacgatcatgtgataactgcggtagccgtttggctttggatttttgatatagtcctttacctgaatgacggtaatgtcatcctgcctggtgatcaggtctgcaatggtgtagatatcatcgataaaggcacagacaacacggatgcctgccacgtcattcagctgattctgaatattctccgcagtaaactcatagccgagctttttgagctttttgtaaatgctttccggctttttgatccttgttttgatgaaggagatcgggttacgtttatattccaatgaaaattcatcgttgaggacttctagcttggtgcgtacctcacggaccgtacatcgatacatcatcatcagatcattaaattttgcggaatttttgataaaaacctgtggatcgggggtatccagccaggtgtttgtatttctttcagccatagtgtttttctggtgaaactcctttcttatgtgatatttataacaattacttttatacaattatagaacaaaatgatatttttttcaacttttgtattgacatatcagaaaagctgtgctattttataaaaaaaaaattaattgagtaaaccactaaaccactaaaccgttgaagcggagataaagatattcatgcgcgcacagagagtccgggagggtgagagccgggtcgagaggcagtttatcaaatggaccgcagagggcacagggaaagatattttcgggtatcaagtattctgtgacgtgagggcatacgtcagttgccgggaatatgaaggtattccgccaagtgcacgggtcagaccgtgaatcagggtggcaccgcgggtgattttgaatttagagctcgtccctgacagaaccagattctgtcggagacgggcttttcttgatttcatgagcaagcagcgaatgcagatcacgaatgttccgtcctccggtaaggaatgaaaaactcaggagggcctgtatatgtatccaacattagaaaaaatcaaagaactagcacagtcaggcgaataccggcgaatccctgtatgcagagagctgtattccgaccgctatacacctgtagaagtcatgaggaccttacgcacagccagcagacattgctatcttctggaaagtgccagccagacagaggtatggggacgctattccttcctgggatatgagccatccatggagatcacctgtacagacggaaagcttcagatccgcaggctccatgaggacggaactgaagaaaaaaccgtacagcaggtgaagcatccgggagatgctattcgggagatcctgaaagaatacaaaagcccggtgctggaaaatatgccgacctttaccggaggtctggtaggatatttttcctacgattacatcaagtacagcgagccgaagctgaagcttaccgacgagacagtacaggatttccgggacatggatctgatgctttttgaccaggtgatcgcctttgaccattacagacagaaggtgcttctgatcaccggtgtgatgacggatgatccggaaaatttctatcagaaggcggaagcaaaattaaaagagatggcagatctgatccgaaacggaaaacagaaggaatttccgtctttgaaactgaaatcttccattgagccgcagttcccgaaagcaaaatactgtgagatggttgagaaagcgaagcattacatccacgaaggagatattttccaggtggtgctctccaatccgatgcgagcgaaagcagagggaagtctgtttgatacataccgtgttctcagggctaccaatccttcgccgtatatgttttatttttccagtgatgatattgagattgcaggagcctccccggaaacacttgccaggcttgcaggaacagaattaagtaccttcccgcttgcaggaacaagaccaagaggcaagacaaaagaagaagacctggcgctggaaaaaggactcctggctgatgagaaggaacgtgccgagcataacatgcttgtggatcttgggcgaaatgatatcggaaagatcagtaagatccgtactgtgaacgtagaaaaatatatgtgcatcgagcgtttttctcatgtgatgcatattggttccacagttaccggccagatccgggatgacagggatgcggtggatgcagtggatgccatccttccggcaggaacactttccggagcaccgaaattccgtgcctgccagatcatccaggaactggaacagagcaagcgaggcatttacggcggtgctatcggatatctggattttgccggaaacctggatacctgtattgccattcgcctggtttataagaaaaacggtgagatctgtatccggtcaggagcagggatcgtagcagacagtattccggaaagtgaatttcaggagtgctgcaacaaggcaagagccgttgtacaggcaatcgaaactgcacaggagggactggaatgatagtactgatcgataattatgatagcttttcctacaatgtttaccagctgatcggttctgtggagccggatatcaaagtggtaagaaatgatgaagtgaccatcaaagagctggaggccatgaagccggaggcattgatcctttctcctggtccgggaaaaccggaggatgcgggaatctgtattgaatccataaaatatttcaaagacaagctgccgatcctgggtatctgccttggacatcagtccatctgtgaagccttcggagggacagtatcctacgcaaaagagctgatgcacggaaagcagaaagagatatataaagttggaaagagccggatgtttgaaggacttccggaaacttttccggcagccagatatcattcactggcagctatccgggatactttaccggaggaactggttgttaccgctgagtctgaggacggagaggtgatggcactggagcataaagaatatccgatattcggattacagttccatccggaatccgttatgacaccggatggaaaaacaatgatcgagaactttaggaaggttatcagagacagataaggcagagaacagcaatccataaaagatagaatcgttacagaacaggaggaaacaacaatgatcaaagaagcaatcatcaagctttcaaaaaaagaagatcttacatatgacgaagcagaagccgtaatgaatgagatcatggacggagcggcaacaccggtacagatggcatcctaccttactgcactttccctaaaaggagagactattgatgagatcactgcatcagcagccggaatgcgtgcacactgcatcaagcttctccacgatatgaatgttctggagatcgtaggaaccggtggtgacggagcaaactcctttaacatttccacgacatcttctcttgtgatcgcagcaggtggcgttccggtagcaaaacacggaaaccgtgcagcatcttccaagagcggtgcagcagatgttctggaagcacttggcgtaaagatcaccatcccgccggaaaaaagtgcagagatcctgaaaaagatcaacatctgtttcctgttcgcacagaattatcatattgccatgaaatatgtggcaccgatccgtaaagagctgggaatccgcacggtatttaatatcctcggaccattaagcaacccggcaggcgcaaacatggagctgatgggagtctttgaccagtctctggtagagccgctggcacaggttatgatgaagcttggcgtgaaccgcggaatggtagttttcggacaggataagctggatgagatctccatgagcgcaccgacttctgtgtgcgagatcaaggacggatggttccagtcctatgagatcacaccggagcagttcggctatacatgctgcagcaaagaagatttggcaggcggcacaccggcagagaacgcagagatcacaaaagccattgtaaacggaaccgaaaaaggcccgaagcgtcaggcggtctgcatgaacgcaggtgcagcactttatatcgcaggaaaggcgaagactatagaagatggcgtgaagatggctgaaaacctgatcgacagtggtgcagctgctgctaagcttgcggaatttatcaaattaagtaacgagatttgaaaataatagcggcagaagagaaatcggcaatccctatcagaagagatatgaacggaaacattaatctgtcaggctttttgaaattgccgaatgagtgttgaaatatcaaggagacaaacaaagaatgagtgaaaaaaacattctggaagaaatcgcagaaaaaacaagagaacgtatccggaaggaaaaacttcagtttcccctggatcagctgaaagctctggctgaaaaagcaccacagcagccgtcctttctggaagcgttgaaaaagccgggcatgtcctacatctgtgaagtaaaaaaagcttccccctccaaggggctgatcgcaccggaatttccgtatctggaaattgcgaaagaatacgaggcagcaggtgcatctgcgatctcctgcctcacagagccattttatttcatgggaagtgacacttatctccgtgagatcacagaaacagtggatattccggtccttcggaaggacttcactgtggataagtacatgatctatcaggcaaaagcattcggcgcagcggctgtacttctgatctgtgctattttaaatgaccaggaactcctggaataccgagagcttgcagaaactctgggaatggatgcactgatagaagcccacgacgaggaagaagtggcaagagcattaaaagcaggagcaaagatcgtcggagtcaacaaccgtgatctgaaaacctttaaggttgatatgaataacagtatccgtcttcgaaacctggcaccggacaatgtggtatttgtgtctgagagcggaatcaaaaacgcaggtgatatcgctatcctggaaagaaaccgggtaggtgcagtcctgatcggtgagaccctgatgcgaagcccggataagaaagctgcattggaaaatctgaatggtagagcgcttgtataaaggccaaacgaaagaatagagcaaataagtaacagagctgaccagcagcaaatagtaacgaaacaggaaggggcagggtcagacagaaagggcaggattggctgaatatgagagaacaaccgttgaaacatgggagcagaaccaggatcaagatctgcggcctgacccgcccggaagatatccaggcagttaaccaggctaaaccggactttgcaggattcattgtagaattcccaaaaagcagaagaaacgtcaccgtggagcaattgaaggctctcagggaagaactggatgatagcattttgccggtaggcgtatttgtcaatgcaccggtggagcttcctgcacagcttttaaacgaaggaaccatcgcactggcacagcttcacggccaggaggacgagaattatatcagacagcttaagaccatgacagaccagcttctgataaaggctttttccataaaaacagaagcagatataaagaaagcgatccgttcggaagcagactatattctgctggatcagggcgcaggaggaacaggagaaactttcgactggagtctggtaccggcgatcaaacgtccctggtttctggcaggaggtctgggctgtgaaaatctggaatcggccatacatctgcttcacccctgggcagtagatttaagcagcagtgtagaaaccgacggtcacaaagacccggataaaatattagaagcagtatacgcagtaaggaacataaaggaggaaatataacatgtcaaaaggaagattcggcatccatggcggacagtacatcccggaaacactgatgaacgccgttctggagcttgaggaagcatacaaccattacaaaaacgatccggaattcaaccgtgagctcacagagcttctcaatgaatacgcaggaagaccatcccgtctttactatgcggcacatatgaccgaggaccttggcggagccaagatctatctgaaaagagaagacttaaaccacacaggagcccacaagatcaacaacgtacttggtcaggtgctcctggcaaaaaaaatgggcaagacccgtgtcatcgcagagacaggagccggccagcacggtgttgcaactgcaaccgcagcagcactgatgggaatggaatgtgaggtattcatgggaaaagaagacacggaacgtcaggcactgaatgtttacaaaatgcgtcttctcggagcaaaagtccatgcagtcacaagcggaaccgcaaccttaaaggatgccgtttccgagaccatgcgtgagtggacaaaccgtattgcagatacccattatgtactgggatctgttatgggcccgcacccgttcccgaccatcgtacgtgatttccaggccgtgatctccaaggagatcaaagagcagatgctggaaaaagagggaagacttccggatgttgtcctggcctgtgtgggcggcggctccaatgctatcggaaccttctacaatttcattgaggacaaagacgttcgtctcatcggctgtgaggcagcaggacgtggcgtgaatactgcggagactgcggcaaccattgcaaccggtcgtctcggaatcttccatggtatgaaatcttacttctgccaggatgaatacggacagatcgcaccggtatactccatctccgcaggtcttgattatccgggggtaggtccggagcatgcacacctttatgatatcggaagagcagagtacgttcctgttacagatgacgaagcagtagaggcttttgaatatctttccagaacagaaggaatcattcctgcgatcgaaagtgcccacgcagtggcctatgcgaaaaagatcgcaccgacacttggaaaggacaagatcatggtagttaccatttcaggacgtggagataaggactgtgcggcaattgcccgctacagaggggaggatattcatgaataagagaattacagaagcatttgcaaacggaaaagcatttattccttttttaacctgcggagatccgtctctgaaggtaacagagcagctggtttatgcaatggaagaagcaggagcagatctgatcgagcttgggatcccgttctcagatcctaccgcagagggacctgtgatccaggaagctaatgtccgggcacttgcaggtggcgtgactacagataaagtttttgcaatggtagaaaaaatccgtaaaaatacaaaaatcccaatggtattcatgacctacgcaaacgtagtattttcttacggaacagagcgttttatcaagaaagcagcggaagttggaatggatggactgatccttccggatgttccgtttgaggaaaaagaagagtttgatgttgtgtgcaaacagtacggccttgacctgatctccctgatcgcaccgacctcccatgagcggatcgctatgatcgcaaaagaggcggaaggctttgtttactgcgtatcttcccttggtgtaacaggaatgcgtaccagcattaccacagatatcggagctatggtgaaattagtaaaagcccagaaagacattccatgtgcagtaggattcggaatctccacaccggagcaggcaaaaaaaatggcagatcagtcagacggtgccattgtaggatctgcgatcgtgaagctctgtggtgcctacggcaaagactgcgtgccgaaggtgaaggtttatgtgaaagagatgaaggatgcaatcagataagttcccggctgaaatcggaacacagatcacaaagtgtaataaaaatctgctttatcccaaagaaagggtaaagcagatttttttcctgctctgaacagaggccggaaaaattgcaggaaatatctacttgacagtcagagaccaaatgatagatgatataaaaaaaggtgaggaggaaattggggatgaatcgggaagaagcaaagaagaaagcagaagcgctggttgccaggatgactctggaggaaaaggccagtcagttaaggtacgatgcacctgcaataaaaagattgggaattccggcgtataactggtggaatgagggacttcacggtgttgccagagcagggcaggcaacggtttttccacaggcgatcggaatggcggctgcttttgaccggaaaagtgtggcagagatggccggtatcgtggcaacagagggcagagcaaagtataatgcatattccgtaaacggtgacagagatatttataagggattgacgttctggtctcctaatgtcaatattttccgtgatccacgatggggtagaggccatgaaacttatggggaagatccgtatcttacaaaagaactgggagtttcctttgtaaaagcacttcagggaaatggggatacaatgaaggcagcagcctgtgccaaacattttgcagtacattccgggccggaggcactccgtcatgaatttgatgcggaagcatccgcaaaagatatggaagaaacgtatttgccggcattcgaaggtctggtaaaagaagccaaagtagaagcggttatgggagcttataaccggacaaacggggaaccctgctgcggaagtcccacattacagaaaaaactcagaggcgaatggaaatttcaggggcattttgtatcagactgctgggcaatccgtgattttcatgaacaccatatggtaacggatacagccgttgaatctgcagcactggctattaataatggctgtgacctgaattgtggaaatacctatcttcacattatgaaggcatacgaaaaggggcttgtcacagaagaaaccataacccgggcaacagtgcggctttttaccacaaggtatctgttggggttgtttgatggaagcgaatatgacaatatctcctatctggaggtggaatctcccaggcatctggatgcagcggagaaagcagcggaaaaaagctttgttctgctgaaaaataacgggattcttccgcttgataaagaaaaactgaaaacaatagggattatcggaccaaatgcggacagcagacaggcgctgatcggcaattatcacgggacagcttccaggtatattaccatacaggaaggcatccaggattatgtgggagacgatgtaaggatccttacttccagaggctgtgatctgttccgagaccggacggagcaccttgcgtttaccagagatcgtattgcggaagccaaggtggttgcggaaaacagcgatgtggtgatcttatgtatgggactggatgagacactggaaggagaagagggagacaccggaaacagctatgtatcgggagataaagaagatattgaacttcccggagtacagcgagaactgatggaagcaatcgcagatactggaaaaccggtagtattctgtctgctggcaggaagtgaccttgatctgaaatatgcggcagagaaatttgatgccgtcatgatgctgtggtaccctggatgccagggcgggaaggcagcggcaaaggtactgtttggagaaatctcgccatcaggaaaacttccggtgacattttatgaaagcctggaagaacttccggattttaccgattattccatgaaaggcagaacatatcgctatatggaacgaaaagcacagtttccttttggatatggtctgacgtacagtaaggtggcagtagataaagcagaggtcaaaatatgtggacagaagataaacgtggaggtagaagtgcagaataacggcgcatatgatacagaggatgttgttcagatctatgtaaaaaatatcgacagcaaaaatgccattcccaatccgatgctggccggttttcagcggatattcctgaaggcgggagaatgccgaaaaatagaaatcccaatatgggaaaaagcattcaccgtagtagatgaaacaggaaaacggatggaagaaggaaagaaatttgaaatttatgcaggctgcagccagccggatgaaaaaagcaaagaactgaccgggatcatgccggtaaagatcatctgggaaaaataataagaaaatctaaagtaacaggagggcgctgcatcaggcagcgccctcccttcatatctaacgcataaacaaccgtaccattttctcataaatcttccgatatttctgataccgcataggaagatcgatccaggtctttttatctacaatactcttataatgagagaatgtccggaagccgtcgatgccatgataggagcccatgccgctttcaccaaagccgccgaagcccatattgctggttgccagatgtatgaggacatcgttgatacagccaccgccgaaaccacatcgggaagtaacttcccgggcatttttttcatcttcggtgaagatataaagagccagcggatgcgccatggaattgatctttgttacggcacctccgagagagtcataggtgaggaccggaagtaccggaccgaagatttcctgctgcatgaccggatcttcgaaggttacgttatcaagaaccgtcggctcgatctgaagtgtttcacggttggaaccaccgccgcagacagttttggcaggatcgatcagactgttgatacggtcgaaatgcttttcgttgatgatctttccataattccggttcttcagtggttcttttccatactggcgtgtgatctgtctgcgaagctctgcgaccagggcttctttgatctccggatcacagtagatgtagtccggagccacgcaggtctggccacagttcaggaacttgccgaatacgatacgttttgccgcaaggcggagattggctgttttgtccacgatgcaggggctttttccacccagctccagagtgactggtgtgaggtgttcggaagcctttctcatgacctcttttcctacagactggcttcccgtgaagaagatgtaatcaaagtgcagactgagaagatgtgtgttttccgcacgtccgcctgtgacagttgcaacgtatttttcatcgaaacattcatggatgagaagacggatcacttcgcttgttgccggcgagtaggcacttggtttcaggatgactgtgtttccggctgcaatggcgtctaccagtggttctatggtgagaagaaacggatagttccacggactcataatgagaacaacaccgtagggggatggtttgcggaaactgtgggaatggaactgtgccagtggagttggaacggtctgttcttttgcgtaggagcggatatttttcagcatatgtgtgatctcggagagcaccagtccggtctcacacatatagctttcgaaattactttttcccagatcctttttcagcgcggcgtggatctgatcttcgtgtttccggatggaagcgcggagacgtttcagggcgctgatgcgaaaatcaaggtcaagagttgcgccggagtagaagtactggcgctgtttatctaaaagctggttgatctgttctttttccatggaattgtagtcctttctgaaaaaactgtattcgaaatatcgaaaaaatctttctatgccaatggctgttttagcaattgcctgccggaggcatcagtctgtaatacagtgtctcaagttcgccggcatccatcagcacaggaaccgggtacagaggattggcttctttatctgcgtaatgggcaagctccgggatgtctgtttcctggatttccgggatatagcctccgatgccatagcgttttttcatatcttttattgcatcaataaacatccgggcagcagttttatcgtcctcatgtttatcgcagagaccggcagttacggcaaggttgcggagtttgtgagtgatgggatctccgtatgtttccagtaccataggaaggatcactgcattggcaagcccatgtggaacattatattttccgccgagggaatgtgcaattgcgtggacatatccaacgtaggatttggtgaaggcacagcctgcgaaataggaggcgcggagcatatttcgtcttgcttcaatattattgccgtctgtgtaggcggtatccagattttcaaagatcagtctgacagcatccagggcattttttcttgtgccaggtgtagtggaatttccaatgtaggcttccactgcgtgagtcagggcatccatgcctgtggtagctgtgataaacggcggaaggcttaaagtcactttcgggtcaaggactgcgtagcgtgggatcagcggaaaatcgttgatggcatatttgtgccgtgtttctgcatcggtaatgacagcagcaagtgttgtttcacttcctgttcctgcagtcgtggggatggcgatgagaagaggaagctttttgtggatcttcaggattcccttcatctgagcaagagactggtgtggcttggcaatgcgggctgctgtggcttttgcacagtccatactggaacctccgccgaagccgatgatcgcctggcagtcattgtccagatacatgtgaagggcttcgtccacattgacggttgttggattggcaacggttctgtcgtagatgtggtaagagatgcagtttcgcttcagtgtctgctccagtctttctgtaaggccaaggcttcggatccctgcatctgtgatgatgagtacattgttatagtttcttttttccagaacttccggaatacctttgacgcttccgatgatcttcggattgcggtaaggaagcagtggaagggcgaatttaaagacattctggaaaaaccggcagtaagctttttttaatggattcatggtagttttcgttccttttaaagtcaaattattttattctaaatattatatatagcagttggaaggggaaaagtcaagattgccgtttatggaagtgcatcgcgaagcgtgttgctgagaacagagtaaccgtaacgtcataaaaaagaaaacaggaaaatataatattgtcatggttgtaaatatcctttacactaagggagtcaaacagaattattatgcaaggattgtatatccagcgtaaggcaaatgttcgcaggatagatattgatcacggaggaaatcatgccagaaacagacacatccgcaaaaaatcctcttcatgtatccgaagtggatgataatttaaaagaattaagccctcacggttcctttgagctgccggtggaaacctatatggcgaactgtgagatctttcatgcactgtatgaccactggcacagtgagatggagatcatgtatattgaaaaaggcagtggctttgccagactgaaccgggagagcatccgcctgaaaaagggggatatcctgatcgtgaactgcggagttctccatagtatgcgcacggatcttaagaagcctctttattataagagtgtggttttcagcctgggcttccttgcaggtcagccgggagatatctgccaggaatgtgtggtatcaccattaatagaaaacaaggcagaattctgccatcatatagaagaaggagattccggatatgagaagctacgggaaatttttctggagatccatgactgtcatacggagaagaagccatatttctatgtgaagctgaaaatgctgttctttgatttcttttatgagatgctgacgaagcattatattatcccggtaagcacagagcagaacaagagccttgcggcagtaaaggaagtgctggatcatatcagccttcactaccaggagaatcttaccgtttcagagctttccggactttccaattacagtgagtattattttatgaagcttttccgccagtatacgggaaaaaccctggtggaatacatcaatgacttccgtatggagaaggcgaagtatcttcttacgcattccgatgcacctgtgacggagatcgccatgcaggtgggatttaacagtacaagttattttataaagaaatttcagcagtccaataaggtttcaccgcataagtacaggaagagtatgagacagatctgagaaatctcccgaagcaaccgcatatgtatcggttatgtttttatgcagagctacagtaaaaagtgaaaaacagtctgacaaatatcttgcatatcatgacaggattgttatatttttgaaaagaaatgcgtgatatcctaatatcatcaaaaacaaagcaaacaaccttgtaaaaacatatttcatcccatcaagatccatgaaaggagatcaaaatggaaacattaagcaaagtatttgaagacaaatataacaaaaatgtaaaagattgtacaaacgaggaaatctatcacggacttctctcctggacaaaggagcagctgaagggccgcggctaccaggaaggaaaaaagaaaatttattatatttccgcagagttccttatcggtaagcttctttccaacaacctgatcaatctgggcgtttatgatgaagttgcgaaatatcttaaagaaaacggaaaagagctttccatgatcgaggagatcgagccggagccatctctcggaaacggcggacttggccgtctggcagcatgcttcctggattccattgcaactctgggacttccgggagaaggaatcggacttaattatcacctcggacttttcaaacaggagtttaaggatcatcttcagtttgagacaccgaatccgtggatccagccggagagctggcttacagatgcaggcgtttcctattacgtgccgtttaagggctttatgctgaaatccacactgtatgatattgatgttgcaggctatgaaaacaaagcgatcaagcttcgcctttttgatattgatattgcagacgagagcattgtgggcgagggaatctcctttgataagaaggatctgctccacaatctgacactgttcctttatccggatgacagcgatgatgcaggaagaaagcttcgtatctatcagcagtacttcatggtaagcaatgcggcacagctgatcctggatgaggcaacagcaaaaggctgcaatcttcatgaccttgccgattacgcagtgatccagatcaacgatacacatccgagtatggtaattccggagcttatccgtctcctcacagagcgtggaatcgagttcgaggaggcatgcgagatcgtatctcatgtatgcgcttataccaaccataccattcttgcagaggcacttgagaaatggccgatctcctatcttgaggaggttgttccgcatctgatgccgatcatccgcaagctggacgagcgtatcaaagcaaaatatccgcaggaaaatcttgccatcatcgacaagaacgacctggtacacatggcacatatggacatacactacggattttccatcaacggtgttgcatcccttcataccgatatcctgaaggagacagagcttcatcagttctatgagatctatccggagaaattcaataacaagacaaacggaatcaccttccgcagatggctccttcactgcaaccatccgctgacagagtacatcacatccatgatcggtgacggcttccgcaaggattcctttgagcttgacaagatgcttggcttcaagggaaatcaggacgttcttgcaaatatccttaagatcaagcaggatgcaaagaagagatgtgcggagtttatcaaagccaacacaggtgaagagatcaacacacacagtgtttatgatatccagatcaaacgtcttcatgagtacaaacgtcagcagctgaacgcactttacatcattgaccgttacctgaagatcaaggcaggcgagaagccgcagcgcccggtaacctttatcttcggtgcaaaggcagctcctgcatacgttatcgcaaaggatattagccacctgcttctctgcttacaggagcttatcaacaatgatccggaggtttccccgtacatgaaagttgttatggtggaaaactacaacgtaagtgcagcagagaagctgatccctgcctgcgatatctccgagcagatctctcttgcttccaaggaggccagcggaacaggaaacatgaagttcatgctcaacggtgctgtaacactgggaaccatggatggtgcaaatgtggagatcagccagctggtaggcaaggataatatctatatcttcggagagtccagtgagcaggttatcgaacactatgaaaaggctgactactgctccagagatttttatgagaaagacgagcgcatccgtcgtgcagtagactttatcgtaggaaacgagcttctttctattggaagtgaggagcatttaagaagactgcatcatgagatcgtaagcaaagactggttcatgactcttcttgacttcgaggattatgcgaaggtgaaagatcaggcactgtccgattatgaggacagaaccgcatgggcagagaaaatgcttgtaaatatcggaaaagcaggatacttctcttcagacagaaccatcgaggagtacaacagagatatctggcatctgacaccggagaaataaaacggttttaggcagattgctccggctcggaagaaaaatagaaaaatagaaaataaaaacgccggcattcattggaatatgtactggggctgagatgtcagagatgatctggcagcctggacaggacatgttacagatgaatggccggtgtttttttgtgaaattggttgcgaaaaattgtttacggaatcaggcaagcgatacttcaggcttttccatgcttaaatgccatcatcatctccttggtaaggctgatattatctccttcatccggaatgtcttcccggttgaaccaggaggccatggaaagctcatcgtggtctacagtcagagtgtcgtcgccatccagatcacagtagaagccaaacagaagtgttccggagaaggaccatggctgacttttgtagtagcggagatttttgacctttacgccgatctcttccataacttcacggtggacagtctcctcgatggtctcgccaatctcggcaaaacctgcgatcatggcgtagcgggtgtgatttcggccctcatatttggagaggatcagcttgtcaccgttggtaacgcctacgatcacagctggagaaagcactggatattcaccgtttccacaggcagggcagatcatcttgcgctcatgtttatcatgtaccatcggttttccgcagcagccgcagaaacggcgcttgctgtaccactgaaagagctgatatccggtgattcctgcgaaagccagatactgtggctctgctgtgcggagaactcttgtgatctcaaactgataaccaggaaggagcctggtgtcaagatccgggatcagataaaaatgctcttcgtcaatggagaagagatagatataattctcatagagattttcaacttttccttccagctctccaaagcttggaagagtcatagtctcgccatcttttttcataaggatctttccttcttcataggcgaggatgtggctttctttatccggggccacaggtttgtactcattgtgataggtatgtggtgcgatatcctggatcatgatcgataattcctttccgaatttattgttttacagtgtttgctgagaagttttgccatataaaatacagcacgctttctacagtataagcttaccttaagaaaaaggcaactccagcaataacaaaaaaagttgtatgagtcagaaaatcagtgtaagataaatgtattatattgtgcagaagatgtgaaagatctgaaaatttttctgcacagaaggagaaaattatgccaacaacagaaaagccgggactgacccgggatgccattaaatatctggcaatttttaccatgcttctgaatcatatcgccaacgtgcttctgccggaaaacacgatcctgtgggaagtgtttatagacattggctacttcacagccattaccatgtgctattttcttgtggaaggtttttactatacacattcccggagaaaatacggtgaaaggcttctgatctttgccgggatctcccaggttccctatatgatagcctttggaaattcacagctgaatatgatctttactctgtttatctgctttatgatcctggttgttcaggaaaagatgatggcaagtaaatggagaattccacttctgatcctgctccttttactatccgtttgttcggactgggcgatcctggcaccggtttttaccatctggttccatgagagctgggggaacaggaagaggctgataacagcgttcggagtcggtgctgccctttttgtgctgtttaactacagctcctacgtggaaaaaatggcagccggaccggcaatgatccatgctctgctttcggcagcagggatcgtagcatcaggaatcatcatcctgtgcttctataatggcaaaaaatccgaaaaagcaccgaagttttccaagtggtttttctatatcttttatccggcacatctgctgatcctgagcatagtccgtgttatagtacagtaagagataaaataaaatctctccaatatttataaccggatagattgccgaaaataaatttcatatccacataaaacatagtaattctgtaagaaaacagaaaaatagcgaaaaaactcttgaaaacccacaaattatctgctatgctaactgacatgacaaaggcgtctggaaattgagtttccaggcgctttttgcgttgcagaataattgagggaatcgaggaggaaatgaatgatgaatgcaggagataccggctttatgctgatctgtacagcctttgtgttctttatgacacctgggcttgcgtttttctacggaggactggtccgcaggaaaaatgtggtaaataccatgatggcctgtggggcgatcatgggactgtccgtagttatgtggacattgcttggatattcgctggcatttggaggaaatcatggcgggatcatcggagattttcgctggtttgcgctgaatggtgtaggctgggagccgggaccttatgcggatacgatcccgcatctggtatttgtggcgttccagatgatgtttgctatgatcacaccagcactgatcaccggtgccgtggttggaaggatgcgttttaaggcactgtttttctttattgcgatctggtctttgatcgtgtattatccaatggcacatatggtctggggagacggtggatttctggcagccattggctctgtggactttgcaggaggaaatgtggtacatatcagttccggtgtcagtgcactggttcttgccatttatcttggacagagacgaggctatgcaaaagcaacctatcgtacgcacaatatcccgtttgtatttctcggggcagccatgctgtggttcggatggttcggctttaatgcaggaagtgcgctgaaggcagacggccttgcggcacatgcctttatgaccagcagcatttcttctgcctgcgcactgctggcctggatgctgatcgaggtgatccgtgagggaaaaccgacactggttggtgcatccacaggtcttgttatcggactggtagccattacaccgggagctggtttcgtaccggtatgggcatcctttatcattgggattctggtaagcccgatctgttactttactgtgatccttttgaaacagaagctgaagatcgatgatgccctggatgcttttggctgccatggtatcggtggtatctggggaggaatcgcaacaggtctcttcggaaaaacttccattaactctgttgcaaaatgggatggccttgtgtttggagatcaccgtctgttcctggcgcaggtattgagtattgtgatcaccattgcggttgctattgtgggaacgctgatctgtatcgggatcgtgcggatctttacaccgcttcgtgtagatacgaaggaagagatggttggtctggatgcatcccagcatggagagaatgcatatccgtcatttaatggatttgactgataaaagaatttgttcggcaatgatcgtgtgaaaatggaggaaatcgtatgcttataaagatagaagcaatcgtaagagaagaaaaaatggaagatgtaaaagcagcgttaaatgagatccaggttaacggttttacagtaacccagatcatgggatgcggaacacagcgtggttacacagagtatgtccgtggttccaagatcgatgtatttctgaaaccgaagatcaagtttgaaatcgtggtatcatcggaagattgggagatcaaagttattgatgctgtgcagaaagcagcgtttaccggtgatccaggcgatggaaagatatttagctatgagatccgtaacgctgttcgtatccgtacaggtgagaccggatacgatgcgctgcagtcggagttcctgtaaaataataaagatataaaaaagatccttctggaaaaactgagatattcagattttcagaaggattttttgcagataattaacaatagtcttactttgatttgatgcaaatttctgcagttacatataagatagaaaggtacacaatagatcagttagaaagtaaaattaaaacatacggaaaaactatgtcaaaaaagaaatcaaagaagatcagaaaagagcaggctcaggagttgagttcagcagaaccggaacatcttaaactggcggcagaaaaaacagcagccattgcaagttacatcaaggatccggactatcgtctccgctgcaaggcggctatagatattctcatggcgaagcttaaaatgattaacgcagaactttccggacagaaaaagcgtactgtgatcagtcagatcaccaaccggataaaaagtgctgaaagtatttacgctaaacttctgaaaaaaggactggaaccggattttgagactgccagaaaaaatctgaaagatctcatcggcatccgtgtagtctgtccgtttgaggatgagctttaccaggttgcagaatccctggaaatgcagaaggatatcgagatcgtccggataaaggattacattaaaaatccaaagaaaaacggctacaaaagtcttcatctgatcgtgaaagtacctatctactctgcggaaggtgaacagaaagaactggtggaaatacagcttcggaccattgcgatggattactggtctgtgttagaatatgaattgtattataaaaaaagagacaatgcggaaattgaaacagaattaaaaaaatatgcagaagaaattgctaatctggatcacagaatgctgggattacgaaataaaatcgaaaaaatctgagcaatcagcgaatgcgagatcagaatgcctgttttatgacaaacctgtaaaattactgcatcagaaaaggagaatatcccggtgctggagaaataaaagatatttacacatgaaattataaattaggatttataaaaaagaaaacggagaattcccgaaagaaaaatttaaggaattctccgttttattatctgactgagcaaactatgaagttattattcaatatagagctgtgcaacaaatggggcataagatatccaactgctttttctctgccatagttgcatttcaactgcaaagatgacacttttcacaggcggacggtgtggctgcacaaccgccgagagcagtttcacgaagctctgcaggaagctttttgcccacagtatacatggcatcgatcatctcatccagcgggatgaactgggggataccggccagtgacatttccgctgcgattagggcattggaaacaccggctgcgttacggttctggcagggatattccaccaggccgcctacagggtcgcacacaagtccaagcatgttcataagaaccgtggaagcagcataagtacactgaagaggtgtaccgccaagaagctccacagcagcagaagcagccattgcagaagcgattccgacctcagcctgacatccgccaacagcaccggcaactgttgcattacgcatggcaagatagccgatcgcgcctgcattaaatagtgcctggcggatttttttatcggaaaagccgtagacctcctgaagagcaagcatcattccgggaacgatcccggcactgccggcagtaggagaggcaacgataagtcccatggaagcgttggtctcaagggttgccatagcgtaggtgatcccctttccgagaacatttccgcacaggctttttcccaggttatgaaattcgcagagctttcgggcttcaccgccgatcagtccgcccatagatatcaccggatctttgatgggggaaaaagcagcgtccttcatgatctccagaacacggtccatgcgctggtccacgatttcagcagtggtttcaccgagaaggatctcacgctggcgcattacttcggaaatcggaagctttttttcttggcagagagcaagaagttccttggcatttttgaaatccataaaacacatcctccttttccctacatctgaacaaccatgacatcatggatgttggtgttccggtgaatgctttctacgatatcttccgggagatgaccatcggattccacgatcgtataggctgtggttcctttggattcacggaagaggcgcatgaaggcaatgttaatgttacgttcacttaagcatctggtgatgtaggccacaacaccgggagtatcctgatggatcacgatgatggcactgtattcgccggtgaaatccactttcacgtggttgatctccacaatgcggaccttgccgccgcccagcgattccccccggactgtcatttcctgtccctgttcattgaccatatggatatctacagtgttgggatggacatcggtttccgcttcatttggagtaaaggaaaagtcgatcccctgttccctggcaatatcaaaagaatttcgtatacgcatgtcatctgtggaaaagcccatgatcccgccaaggagggcacggtctgtaccgtgtcccttgtatgttctggcgaaggaaccataaaggatgaattctacttttttcaggggcggcgtgatcatcttctgggcaaggaaagcaatacgcgcagcccctgcggtatgagaactggaaggaccgatcatgttgggccccataacgtcaaatacactgataaaagacattttgcttaatcctcctgtggtgtttttgcgataaatttcttataaatggtgtcaacgatcacgccgatggcgttgtcaccggatacattgcaggcagttccgaaggaatcctgggtaatgtaaagggcaaccatgatagcacagatggcaccgtccggatcaccggcttccgctccgaataccatgtaaaggaatggaagggcagtcatgatggaaccaccgggagcaccgggagatgcaaccatggcaacaccgagagtcatgatgaacggaacgatgatcccaagactgatgggcagctggttcataaggcagactgcagtagcacaggctgtgatggtgatcatggaaccggccatgtggatgtttgcacagagcggtactacgaagttgcggatctgctcgcacacgccgtcctttttggcacattccagattgaccgggatggtagctgcggaagactgggttcccagagcagttgtgtatcccgggatctgatttttgatcagagtgaaaggattctttttgctgacagtacctgcgatcacaaactggatcgtaatgcagatcaggtgcatgatgataacaacaaggaataccttccagaggatgcttaagatggcaaaggtttttccggaaatagtcatatctgtgaaggttccgcagatgtaaagcggaagcagcgggatgataatggtatgaaggaccttgtcaatgatcttggaaaagtcactcattccgttataaaggctgtttcccatttcttttccacgcatggaagagaggcacagtcccatgacaaaggcaagggcaacagcagaaagagtatccatgaccggctccagtgtgatggagaaaaatggtgtcagggatgcgtctgcggtagctgcgatctgatccagtgcaccttcactcataaagtgtgggaacaggctggatgataccagataggatgcggaacctgcgatcagagtggagccataagccagagccactgtgatcaggagaagcttccctgcaccctgtgaaagatccgcaatacccatggtcacataggcaaggatcatcagcgggatgacgaatttcagaaaggtactgaaaaatccggaaagggttacaacaaagcgacagaagccttccggaaggaactggccgaacaggatacctacgatgatggcaatgatcagcttcggcacaagtccgatcttgatttttttcttttccatttggattctttcctcctaagtatgaatttattcattttgcacaaaaatacgattgacgtcctcgtgattgtattgtaacattgacataaaaataaggcaaattcacagatttcatcatcacgatgaaaaaatttcatagtaaaagggagaaaatcatggaaatccgtcagttggagacgtttgtacatgtagcacagcttcagagcttttccagggcagcagaggttctgggatacactcagtcagcgatcactgtccagatccgtcttttggaaaatgagctggaaacaagactttttgacagaaccggaaagcgtgtggtgcttactccgtccggaaaagagtttatggagcatgcaagccgaatcttatatgatgtaaataaagcaaaaaagtcaatgaatgacgatgcggaactgaaaaatccattgcatatcgggacgatcgaatccctgtgcactgccaagctcccggctgttctcagcaaatttcgtgagtttcacccgaaagtaaatatgcaggtgactattgatacaccggagcagctgatacggatgatggagcataacgggctggatcttatttatatactggacaccccaaggtgggaccagaactgggtgaaggtcatggagaaggcggagccggtagtatttgtggcctctgcagattcggagtttgcgggaaagacgctgaagatggaggatattctggaagagcctttttttctcacggaaaagaatgccaattatcggcaggccctagagcagcagctggcgcttaagaagcaggccctgtcaccggtactggagatcagcgataccgcttttatcatccgcatgctggaaaagaaccacggactttcctttcttccctatctggctgtggagcgggatatccggaaaggaagaattgcccttttacatgtggaagatgtggagatatccatgtaccggcagatcttttaccataaaaataagtttaagacaagagagatggaggagtttatccgcctggcggcagagtgaaagtcagagcttgtaaaaacaaataaaatgtggcactataaaagaaaaaaaacacaggagagaaaaaatgaatcttattgaagaagcaaaagctcttggtttttccgatgcagcggtcataagtaccgatcagcttgtatttgtgccggaataccgggttttctgcgaggacaatctttgcgggaattatgataaaaacccggcatgtccaccacagagtggcactgtagaggagatgaaagagcatgcgctgaaatacgaaaaaacgctgatactccagacaatgcaggatggccttatggactacaaaaaggcaaaacttgctcataacaaactgacagaacagctggcagagaagatgaaagaagagggaataactgatcttctgatcatgagtgcaggaccttataaacataattcctgcatgtccgcttactgtgtggatgcacagaaaatggcagacgctgcaggaatgctatgctggaccagcgacggaatgatccgttatttttcccaggttcttttctaggggtaagatgaaggattttgtaaaggaatatgggagaaatagatggagttttacgaatgcgagtatccgttgacagaaacagaaaaaacgtgtagagtttaaataaatgtaattacataaaaagaatcagcaggagaaaaaccagaatggaaaaatcaacagtttatttcactgattttcgttgtccggtgggaaccagccagctggacaaactgaaaaaactctgcgttgccgcaggaatcaaagatatcgatatggatggaaaattcgtagccatcaagatgcatttcggagagcttggaaatatggcattccttcgtccgaactatgcaaaggtagtcgcagatctttgtaaggagcagggcggaatgccgttcctgacagattgtaatactctttatccgggaagcagaaagaatgcactggagcatctggactgtgcaaatcttaacggatttaacacgatcacaaccggatgccagatcatcatcggtgacggagttcgaggaaccgatgaaatagaagttccggtagtaaacggagaatactgcaaaactgccctgatcggacatgctatcatggacgcagatatttttatcagtctcagccatttcaagggacatgagacaaccggctttggcggtgctctgaagaatatcggtatgggatgcggaagccgtgccggaaagatgcagcagcatgccagcggaaagccggccatcaatgaagaagtctgtcgtggctgccgccgttgtgcgaaagagtgcggaagtgatgcgattacatatgtaaacaagaaagcagttatcgattacgataaatgcaaaggctgtggtcgctgtatcggggcctgcagctatgatgccgtatacaatccgaatagcagtgcaaacgagcttcttgaccgcaagatggcagagtatgcacaggctgtctgtcacggacgtccccatttccatattgcactggtacaggatatcagccctaactgtgactgccatggtgaaaatgatgcgccgatccttccggatatcggaatgttcgcaagctttgacccggttgcactggatcaggcctgtgcagatgcctgcctgaaggcaacaccgatcgctaacagccagcttggagagcatctggcagagccgggatggcactgtcaccatgaccactttaaggattccaatccgaatattgagtggaaggcaaccctggatcaggcagaaaagatcggtctgggaaccagggaatatgagctgaagataatcaaataagaaaaagaaatcatataaaattacgaaagcacgcctgcaatatggcgtgcttttttgcacaaataaagaaatataaaatgaaaaaacggataaagacggtattttaaataaaaaacacgtgcgtgcatatgcgtgctagaaatacagctgttgtgaataatatacaaagaaataacaggatgatttggacaaaaacgagaaaacagaaaaagctgtaaatttgtattgcataataaggttgcgtgtgataacatacacacaacataattaacacgcatttaacacgcagataaagaaaaaatagcacgcaaataaaagaatatcaaagataagcggagctaatgtgcaggaagacgtgcagatcgtgtgtacagaaacaggctgcattctgtgggcagagagtacagagcaggccggaaatctttttcagaggaggaaattatgacaggaacacagaaaaaacagcgtctgctgactatgatattcggagctttcgcaatcttttttaccggatatccccatgtatggtctatttaccagccctatgtgatggagcaggcaggctggagccagggacaggcatccatgtgcttttatctggcactgagcacctttgtatttggaaatatcgtaggcggaaggatgcagaaccgctttaaggaaaagacgattgtatggatcggaggcgggatctttgcggcaggaatcctggcatccgcatttctgatcgttcccacaccgcttcctatgtatctgtcctatggcgtgatgcagggatttggacagggaatgatctacacggtgattctggcaaccgtgcagagatggttcccggaccgtaccggatttgcttccggcgttgtggtaactgccaacggactttgcggatttttcctggcgccgctgagtcgaaagctgctggaggcagagggcgtgcagaaaacttttctgatcattggggcagccatcgcagtttcctggatcctgtgcggcatcttttttcaggcacccgataagagtctggtgaacgcaggtggctctgcggcaaagtccggaacatcggagatgaagcagtatacatccggagagatgatgcgtacaagaaatttttatcttcttcttgcgaccatgttctttggactgatttcttattttatggtttcaccggtatcccagacctaccagatcgaccttgggatcccgtctgcagtggcagtcagcgctgttatgcttggatccattgtcaatgcgggagcaagactggtgcttccgacactggcagataaaatgggaagaatcgtctgcatcaaaggagtgctgatcgtggcagtgatcgctatgggagttctcgctgtatcaagatccctggtagtaacggttgctgttgttctgatgtacggctgctacggcggcattatgggaagcttcccgtctctgacaagctctattttcggaatgaagcacaccggggagaattacggatttgtcatgttcggcattgtatttgcaacctttggcgcaccggcaatctccggtctggtgagcagcaaaggttatgagatgaacgtggtatttgggatcggagctgtttttgcagtgatcgcattggtatgcctgactctacttggacggaatcttgtgaaagagcatgccgaaaaatctgccggagtaaagaatgatacagcacaggtaagcaaaccacaggcagaataagtctgaatgtaactggatgcagagctgtgtcgctgccggatcaaaaacagctgactgagaatcagaaaatagaaaaacctggaagaaataaaatgcctgtggctgatttcttccaggcttttttgaggtgccggaatcagatatttctgctgggataacgaaaggatgagaaaatcagatattgtttttgactgtttattttgatctgtcgttcgaagaaaccgtgagacgacataatacaagaaacagagaatttggtgaaaaagatatgcgcagatggtggagagaaaaagatttttcttcagctctcagggaacaggctattacctgcgaaatggatacagacagtattgttgaaaaaatatactcggatttgaacgcagatcgcaaagcgattgcgttcatgagcatataaagtaaatgtaatacaaacatattcagactggcagcataattgcgatcatgctgccttttttgctgctttccagtacttttacctgtccgttatgctgtctgacaatttcactgacaagtgcaagccctaggccggcacctcccatagcgcggcttcttgatttatctacacggaaaaacggggtgaagattttttcttgatattcgggaggaatgccgatcccggtgtcggagacttcaagaaagacataattgaccgacgtggatgtatctgttatttcttcagaaggatggatatttaccgttacttttccaccggagtgattgtatttgatcgcattttccacaagattgtacacagcgcgatacagcagcagatagcttccggtaataatgcagtctccttcctgctgaatcagttcaacttctttctgttcagctacagaagccaggtcgcagaaaacctcatccgtcagtgctgccagtgaaatcctttcggaacgttcaacagtctgtacaccggtcatatccaggaggatttcagccagatgggaaagtcgcccggtctgttcctggagcatggaaaaaatctcctgataatcctttaaagcaggtgcttccctgcgggcaaagacctccagatttgtctggataacggcaagaggagtcctaagctcatgggctgcattggcagaaaactgcttctgtgcagtaaaggcctcatccaggcgtgcgagcattttgttaaatgaaattgtcaggcgggaaatttcgtcattggtagcaggaacttcaagagcctctgaaaggttctggacctctatttggtttacctcctggctgagtctgcgaagcggaagtaatgcctgacggctgataaaataagtgcagatactgctgagaaggatgatgatccctgttaccatgagtcctttggtgagaaaaagttttttggttaactgcagctgatcggaaagctccggaaataagacggagggattcatattaaaggtgatgggagcagaatctgtgttatcgatccgtatcatgtaatctcccagatcctccattccggcaactgcagactggctgataaaaaaatacatcagaatgcaggtgactgtcataagcagtgcggtgatcagtgtcagacgccattgaagagatagctttccggttatttttttcattgtatatcctccgttaaaatgtaaccctggccgatcttattctgtatcggatcaaagccgagagcagtgcgcagcttttttcgaagagaagaaatgtggacacgaatggaattgctgagactgttgacgcttccgtcccagatatgctcgatcatttcttccgggcttatgatacggttctgatgaagaaggaaatattccaaaagagaactttcctttcgggtcagagaaagaggaagtccatcgatactggcctttcttgtacgggtatcaaagctgatacgtccgcattgcagacatacatcctgctggataaatttccttcgtgtcagacttcggatccgtgcctccagctcttcaaaatgaaaaggctttgtgagatagtcattggcaccgagatcaagcccttcaaccttgtcctggatctgtcctctggcagagaggatcaaaacgggagtggaagtatcggattcccgaaactggcgcaggatttccagcccatcaacgcctggaaggttcagatcaagaaggatgagatcataattttccaccagacataattccagtccttcgtccccatcaaaacatgtgtccgcttcatagccatccatgcgaagtccctccgcaatagactggcagagctgcttttcatcttcgattatcaatatatgcataataaattctcctaaaaaacagttgattttgctttgttatctatcatatcatgtatagcataaaattcctgtaaatttttttatttcttaacagagattttatacaggggatgatatagtaaggctacagagagcaagatttacatataaaatatacgtcggttccggatatgggccggtgatatcagaagggagaatataaacaatgaaattaagaacacagaaaataacagcacttatggcagcagcggtattaggaatatctgcatttggaagcgtaccggtaacagcggcagaaagcacggaaacagcagatatcggagaggcaatggcgatggatggagaggcagtttcatcagatctggtagcaggtacatttaagccttccgacgtaacctgtaaggcacaggattcttatgaatatccgtttctgggactgaagctttcactttcgaaggagctgttaaatcagatcaaggatcagagcattgcaatgcttactacggaagattttgagaatcagaccaatgcagtgacatatgcctatgtaagctggagcaaaatgacagaggaacagaaaaatgccgagatacagaagatgggaaccggatatgacgactgggtggcaggtctggacagaattggtacaattggcgtttatgacgaagcttcacagaaaaagctggatgagatcacaggctgtacagagcataaagagtttggaagcagcagtgacgggaaatacaaatattatctgagcaccaacaaagatgcagatgaaaagctgacaaaggagctggaaaagatcaaaaccgacattacggaaatgacaccgtatcagaatatttccgtgtttgaccagccacaggataccagcgtcaacccggaggatgtaaaatctgtaggaaaatttgaaacaacaggaatagatggaaaaacatatacagaaaaagtattcagtgactatgacctgacgctggtaaatgtttttacaacctggtgttcaccatgtgtaaaagaaattccggaacttcaggagctttataaagaaatgaaagagaaaggcgtcggagtagcaggcgtggtgcttgatactacagatgaaaagggaaatcaggacgaggaggcagtaaaaaaagcaggcattcttcaggaaaaaacaaaagcagagtatccgttcctgataccggatactactatgatgaatggccgtctgcaggggatttccgcatttcctgaaacattttttgttgacaaagatggaaacattgtaggcgatacctatacaggaagccatacactggacgaatggaaggaaatcgtggaaaaagagcttaaaaacgtttcaaagtaaaagatgatcattacggagagtgaaaaaatgattcggaaaataacagaatccaggtggatcggacctgctctggcggttttgggaattttactgatgatattgggaatctgcagaggtgaggcatctgtagtttttacaaaagcgatcaacatctgtatggagtgtattggcattggataataagaagatgaaaataaatgaatggccgcggcatgggatccaggcattgtgggcggcccttacaaacagtcacatatcaggctttgtgactggaaagatctataccggaaaactgaaaaatgtctgtgttccggggctgaactgttattcctgccccggggcaagaggggcctgtcccattggttcccttcaggctgtgatcggaagctggaacttcaagatggcatattatgtagctggatttctgatctttgtgggagcgctgcttggaagactggtgtgcggatttctctgcccctttggactgatccaggatctgttgaacaagattccttttccaaagaagatccggacatttcggggagataagcttctgcgaaaactgaaatatgtgatctttcttgtatttgtgatcatacttcccatgtttgtagtagatatcatgggccagggagcaccatatttctgcaagctgatctgcccggcaggaacgctggagggaggtatccctctggtgctgctgaacaaatccatgcgaagtgcggtaggctggctgtacatgtggaaaaatacgatcctggtgatcaccattatcttatcaattatgatataccggccattctgtaagtatatctgtccgctgggagctttttattcggtatttaataaagtttccgtttttcgttacagagtagataaagaaaaatgtgttcactgcggaaaatgcagaaatatctgccagatggaggtcgatccgacggaaaatccaaacagtgcagagtgcatccgatgtggaagatgtaaaaagatatgtccgacacaggcgatccggtgtgggtttgcaggcaaaccctgatacagaaaaatacgaaaacggtacagcttataaaatataaggtgtaccgttttttgcagaaaactacttttccatattatctatcagtaacatattcagctgttcccagcgcttcagatctttttttgtaaaaagcagctggtgacggaacgcttcgctaagctcctgtggttttaaagtgatcacacatttgaatgcgcagggcatcagatccgcactggaaatcccacacaaaagtcctgttgtaaaatctcgaagctccagaggattaaaaatgtacaggagatcttcttccagtgggttatactgatttacaaaggaaaaacggatcagcatatcactgtaaagaacttttccggtgtaaaaaatctcactgcttcttccgttggcagaaacagaacagatcgttaaggttgcttcgtattttccggattcgccttttttttcataaatatcgatgacgccatccttcgtacgctgatagcgtccatcgtaaaagtaaaaatatagccgctgtgcctgaaaaaatgggcttttttgtccttttcccggtgcattggacggtttactggctgtttcaggaagaccagtggtaagctgggacatagatacctggagaatctggctgatctcatataaagtttcgatatcaacggagatatctccattttcatatttgcatacggtagctcgacttttatggatggcatctgccagatcctgcagagtcatctttccggcttttcggtattttcttatttgttcacctacataacaggtaaaattactcattttgtttcctcatactatctatttttcttattaatttatattgtatacgattatatcggaaaaaccggtattttgtaaagtagtaagaaacttttttgaaataaaatttcgtaaaaagaaacttctgccatttgcacttatctttatttaaggtaagatatggctgttaggctgaaggtttcagcctatatcaaatatatacttgaagaggggaaattgaaatgaaagaaaaaggaagtagcttttccggctcaataggctttgtcctggcggcagccggaagtgcagtaggagttggaaatatctggagatttccatatctctgtgccaaagatggcggaggacttttcctgctggtttatctggtactggtactgacttttggatttgtactgttgacaacggatgtagcacttgggagaaagacaaagaaaaatgcattgagggcttttgaatctcttgatccaaagtggaaatttttaggacatttaacgtttatggttccggcattgatcatgacctattattctgttatcggtggatggattgtaaaatatttttttacttatattatttctgatgggaaagatgcggcttcagatgtatactttacatcatttattacatcagatattgcacccgttgtatttatgctgatctttctggcactgactgcctggatcgtatttcgtggtgtggaaaagggaatcgaaaagttttccaggatcattatgccggggctgattcttctgatcgtgatcattgccattttttcactgacactgtcccatactgatacggatggaactgtccgcaccggtatgcaggggctggctgtttacctcaaaccggattttcatggattgacggtaaaacgcttcctggagatccttctggatgcgatgagccagttattcttttccttaagtgtatctatgggaatcatgatcacatatggttcttatgtgaaaaatgaagttaatttaaataaagcaacaaatcagattgagatctttgataccggcgttgcgtttcttgcaggaatgatgatcataccggctgtttttgtatttctcggaaaggatggaatggcttccggcccaagcctgatatttatctcactgccaaaggtttttgatgccatgggagtatttggccgtccggtggcaattgcatttttcctgatgatgggatttgcggcactgacttcctgcgtgtctgtcatggagacactggttgcaaactgcatggaactttatcataaaccacgtaagaaaatgtgtggtgctgtcggaatttattctcttgttacagcagtactgatctgccttggttataacaaactgtattttgaacttaaactgccaaatggttccgttggacagcttctggatgtgatggattatatcagcaacagttttctgatgccgtttatctcacttttgacaagtattctgatcggctgggtgatcggccctgactggatcataggagaagtggaacgaaatggggaacacttcaaacgggcaggattatatcgctttatgatccgttatgtagtgccggttgtaatgctgatattattcctggtatctacaggatttgcagatttgatttcataaatgtggtaatatgtttatggcgtctggacagtcgcattaacggatgaccagtacaagatacgattaaataacagaggatttgatgaaaaaagatatgtacgaatgttggagagaaaactaatacatagaacggaaatgattcagaaaattagacttagctcactttaaaagtgaaaaaataatttgataatttcttgacaagtactaataaatatgttagtattcaatcatcaaattaataaagtcttcggtgactgacggagttgtgggataaccacgagggagccggagattcgatgagtcgaccgtctgggcagtatttgaaaaacttcagatactgctcttttttatgggataaaagatgcagacggttgcagcggagaaaggagaacattatgggatttaaaagtgacatcgagattgcacaggagtgcacaatggagccaattaccaagattgcagagaaagcaggtattgatgacaaatatctggagcagtatggtaaatacaaagcaaagatcgactataatcttctgaaagaaacagacaaaaaagacggaaagctgatcctggtaacagccatcaacccgacaccggcaggtgagggaaaaactacgacaaccgtaggtcttgcagatggaatgcagagacttggaaaaaatgttatggtagctcttcgtgagccatccctgggaccggtatttggtgtcaaaggtggtgcggcaggcggcggctatgcacaggtagttccgatggaggatatcaaccttcattttaccggtgatttccatgcaatcggtgcggcaaacaaccttcttgcagcaatgatcgacaaccatattttccagggtaatgaactgaacatcgacccgagaaagatcacctggagacgatgcgtggacatgaacgaccgtcagcttcgtaatgtagtagacggacttggcggaagaacaaacggtatgccgcgtgaagacggatatgacatcactgtagcatctgagattatggcagttctctgtctggcaagtgatatcaaagatctgaaagagagactttccagaatcatcatcggatatacttacggtaaggttgctgagcagaaaccggtaacagcaggagacctccacgcagagggtgctatgacagcacttctgaaggatgccctgaaaccaaaccttgttcagacactggagcatgttccggcgatcgttcatggcggaccattcgcaaatatcgctcacggatgtaactccgtaaccgctacaaagatggctatgaagcttgctgattatgccatcacagaggctggattcggtgctgatcttggagctgagaaattcctggatatcaagtgccgtatggcaggtcttacaccaagtgccgttgttatcgtagcaaccgtacgtgctctgaaatataatggtggcgttgcaaaagcagatcttaacaatgagaaccttgaggctcttgaaaagggtatcccgaaccttctgaagcatgtaagcaatatcaaaaatgtatacaagcttccatgtgtggtagctattaacgcattcccgaccgataccaaggcagagcttgattttgtggaagcaaaatgcaaggagcttggcgtaaacgtagcactttccgaggtatgggcaaaaggtggcgaaggcggaatcaagcttgctgaggaagtgatccgtcttgttgaagagccgaatgatttcacatatgcttatgaactggaaggctccatcgaggacaaactgaaccagatcgtacagaaggtttatggtggaaagaaagtggttcttacagcaaatgcccagaagcaggcgaaacagctggaggcacttggatttggcaactgcccgatctgtgtggctaagacccagtacagcttaacagacgaccagacaaagcttggtgctccgacagatttcgaggtaacagtaagaaatcttaagatttccgcaggtgcaggatttattgttgcactgacaggtgagatcatgaccatgccaggtcttccgaaagtaccggcagcaaccaagatcgacgtagacgagagcggtaagatcacaggactgttctaatataaagattttttgaggggaattcagatagaaagcggtagagcctgcaaaaatagaggttctgccgctttttcttatattgttgtctattgctcatggcggcggtccagccatttacagatgtagtggccaacaatgttcccggccagaagggtaaagaacaaagcaacatatttctgcatggtgttcacctctttcattcaggattgtatctgcattatatcatatttcgaatgaaaataattgactttttgcggtgaatggactatgatgtgtgtagctaaagaaagtaattatgcttatcatgggcaaagcaaaacccccggaagtggtcgagacttccgggggtttttgtttcgtttatgtaaggtggtttaatcctttcagctggaggttcggcagcaacagcattatagcatgttcagaacaaaaatggtataatattataaattgtcaagaatgtcagcaatctcctgctgcttgttgggataaaactcacaatgtagaggaaagtgcagaggggacgcgcatgtgacatttgcgttaattaagaggaatcctatagaaaaaattgtagagataaatgaatgtggggggaaatatggtatacacatgcaaatataaatcgctaatcggagatattttacttgccgcagatgaaatcggacttaccggtttgtggtttgaaggacagaaatattttgcaaatacacttcccaaagaccatatccaacaggagacggaaattctcacagaagcaaaaaaatggctggatgtatatttctccggtgaagaaccgaactttactccactacttcatccgaacggttcaacattcagaaaggcagtgtggcaaattttactggagattccctacggacagacgatcacatatggagaaattgcgcgcagaattgcagtgatgaaaaacacttcccatatgtccgcccaggcagtaggcggtgcggttggacataatgaaatttccattatcattccctgccatcgagtcgtaggaacaaatggaagcttgacgggctatgccggaggaattgacaaaaaaatttcacttctcaagctggaacatacagatatgagccgtttatttgttccaaagaaaggaactgcactgtaaaactcaggctgagaggacggtctggtgcaggcgtccacgaaaagacagatattttatttatgaaagcatgctatgaaaattgccagcaggatttcggaggaataattatgggaaaaatactggatgaagatttaatctacgagatactgtccgtggtggaagagatacctgagggaaaagtggcctcctacggacagatcgcacggctgatcgggcgggataaaaattcacgtcttgtaggaaaagtcttaggtatggcagaattttacgggaagtatccctgccacagagttgtgaaccatgcagggcgtactgcaccaggctggagagagcagaagatgcttctggaagacgagggtgtggagtttaaggcaaatggatgtgtagatatgaagcagtatcagtgggaggagtagtgttttatgaattgtagaaatatgatgcagatcccggagcttacagaagttctgaagctgaaagcaggggaaaacggtctggagtagtctgtacgatggggctattttgcagactgcctgcagtgcatcaaaagtgaatacaggattgaataactatatccatttaccatgaccgatgagcagatggagaaaggacttgagatctttgaagcttctctgaaagaggcattagaagcatagattaatagaaagttactctgtaatagaaagctactctgtaacagaaaaataaaacatgcttgacaaaccataaattcctcgtataattatcaatggtaattaactaagataattatatgaggagtttttttatgacaaatgaaaagatcaagcggatgtttgatgcattttatcaggcaaagcggatccgggatatgcttccgccactgccacagggagtaatgccatcctacattcagtatctggatgcaatccactctctgcagaaggaaaaaaaagatatcaggatttccgatctcagtgatgccatgaacctgccccgtcccggtgtcaccagaacagtgaaagaaatggagacaaagggatatcttcagaagcttacgtctccggatgacgggcgcgttacttacatttccataacagaaaaaggagagatgctttccaggaagtatgatcaggattatttcagcagtctggcgccctatctttcagagatttccgaagaagaagcagacaatatgatccggaccatcgggaaattttatcagatcatgtgtgacaggagggaacattatgacaaatgataaggcagattttacccagggaaatatcctgaagaagctggttgcatttatgatgccggtactcggtgcgctgatcctgcaggctgcctatggtgcggtcgatcttcttgtagttggaagattcggttccacatccggactgtcagcggtttccaccggaagtcaggtactgaatctggttacctttgtagtgatccagtttgctatgggtatcacagttctgatcgcacgttatcttggagaaaaaagaccggagcagatcggctccgttatcggtggggctgcaatcgtctttaccatgatctctatcgtgctgtttattgttatggtaggttttgcacatccgatctccgtgctgatgcaggcaccggaagaagcggtagcgctgactgcatcttatgtacggatctgtggcagcggaattttctttattgttgcgtataacctactgtctgctattttccgtggccttggtgacagtaaatctccgttgctgtttgtgctggtggcatgtattgtaaatgtgatcggagatctggtactggtagccgggttacatatggatgcagcaggagcagctattgctacggtttctgctcaggccttaagtgttgtatttgcagtagttctgctgataaagaagaagcttccgtttaccattacaaaaaaagatttccggctgaatcctcagtgcagacgttttcttaagatcggactgccgctggcacttcaggaattcctgacccagatttcattcctggccttgtgcgcatttgtcaatcgcctgggtctggaagcatcctccggttacggagttgcatgtaagatcgtaaactttgccatgctggttccaagctccctgatgcagtccatggcctcctttgtttcacagaacgtaggagcaggaaagccgaaacgtgcgagaaaatccatgcttacgggaattggagttggcctgtctgtgggatgcctggtatttatcctgatcctgctgaagggtgatgtgctggcaggattcttttcaacagatgccggcgttatccaaaagggctttgattatctgaaggggtttgctccggagacactggtaacggctgttctgttcagtatgataggctatttcaacggaaacaaccagaccatatgggttatggtccagggcctgatccagacgcttctggtacgacttccaatggcgtactttatgagtatccagccggatgccagcctgacaaagatcggtcttgcagcaccggtatctaccacagtgggaatcattctgaacatcggattctttctgtactttacccgtgtgaaaaaagaaattgtttcggaagaatgaccggataaagggatgtaaatgagaggggtgatatgatataatcagaatcaccccggcagaggtgatggtactgacccctgaaatagctgccggaatcttgacagctgtaaaggaggagtacaggatgatttgcgggatgacgtattttcagatatgtctgtattttttgttttattcttttggaggatgggtcgttgaagttatcttccatgcagtaaccttaggaaaggttataaaccggggatttctcaacggtccggtatgcccggtgtacggatttggtgtactttccgtgtttgcattgcttaatacgcttcagagcggcggacatcagatgagtgagggaatgatctttctgtttgggatcgttcttgcaactgcggtagagctggttgccggatggcttctggatgtatgcttccatgcaagatggtgggattattccaataagccgctgaattttcacggctatatctgtcttgagttttccctgatatggggacttgccattgtgatggtcgtaaaggtttttcagaagtatgtggagcgtcaggcttctcatacaccttccacactggaatgggttgttatggcaattctgtatgcggtgtatctggcagatcttattgtaacagtagcggtgatccgcggactgaataagaagcttacccgactggataaggtacgtgcggatctgcggatcgtgagtgataagctcagtgatactctggcaacaactaccattgatacagcacagaaggtgggagagggaaaggtacaggttgctcttgctaaggcagagctcagagatgcgactgtggctcagagagaaaaatctgccgaaatgcttcggatgaagaaagcggagcttcaggtacagtttgatgagctgtcaagctctatcacaaaccatacggtattcggccagggaagaatcattaaggctttcccggagatgaagcacagagattattttgaactgatccaggaactgaagaaaaaactcagataagaaaaatgaaacgcgataaagaggcagcaggaaatttccaacatttcctgctgcctttttttggagtatcagagtttcagcttatcggattcttttttttatcattggtccgatgatcatggcgatgatcatttttatgagatctgccgggataaacggaattacacagattccaagagctgctttgaaagtggaatctgcaacgatgcagaaccatacagttccgaaaagatagcatacaattgttcctgcgatcataccaacgagctggatcagaggtttatggcagttgtcaattaccagtccggcaataacagccataacgataaagccgatgatgtatccgcctgtaggaccggccagctttgcggggccgccggtaaatccggaaaataccggaagacctacaagtccaagcagaagatagatcagatagctgatggttccttttttccatccgagaagataaagggacagatagatggcaagattggtaaatgagatcggaaccggaccgatcggaatggacagcggcgcaagaatacaggtgacagctgccataagagcggtcatggtgatctcgtaggtttttgtacgtggtgcagagacagtatttgtctgattcatattgaaagagcctcctttgaaaaaggtaatatatttactggttcgggtaagtaatgaaatgctgtaagtgtgtatgacaggtcatatgtccataaggatgcttacgcagattcaatctcataggtgaatcctgcatccgtaatggttttgagagtgtcttcgattccctgaccaccttctgtaagataaccggaagcaaaaatagagtctacaacactgagcagttttttttcttcgcctttaaaataaacttctcttccggcagcacatcggatatctgctttaggtacaagaagtcttgccaggcagaggaccttcatacagtattctgttgtcagctgggaaatatctgcatttccgagaggagttcccttgatcggaagaagaaagttgatcggcagtgcttccggctggatctcacgtaattccagaagcatgtcaacaacgtcttccttactttcacccatgccaatgataccgccgctgcagatctcgaaaccaagtccctgaagcatatggatattccggacacgctggtcaaaggtatgtgtactgcagatattatgataaaaggaacggctgctgttcagattatggttgatccggtcaagaccagcctctttgagcatttttgcctggtgctctgtgagaaagcctatggagcagcagagatgagttccgtgttctttcattttgcggatcctgcgggccagctcctcgatctctttatctgtaaatttcataccactcagtccgatacaatgtctggataaatgataatcatttacgaaatcattgtcctgatataatttgtcttcatctatccatttgtatttatcaatatcggcagtggaacgacatgactgggcacagtaggcacaatcctgggaacagttaccgctgcgggcattggtaaggatgtggatgcttacccggtttcccttatatttgtaacgtaaactgctggcacggtcaatcagtgcctcaagttcttcgtccggagtatctaaaattgcaatggcttcatctctggaaagcgatggagcttctttttcgtatgctgcagtgttcatgtcaataccttccttttgagtttttttgtacgggtatcactttatcacatagaaatattgaatgtcaactgcaaatataaaatgagtttacaattaaaaaactgtagtattaaggtaatgcttaggatcatcgaagcagggaatttccttgattcggttaaaataattctcaattcaatatcatatctttataaaatcttaatacggaagcagagacttttatactatctttgaaagtagttatatataataaaatgcattacgaggatagcactgttaaaagtattgataaggagttctgatcatttatgccggaaaaatcatataagaaaaaacatatgacatcttttcagctgattatcatggggtttgcaggagtgatccttttgggaaccgttctgctgatgcttccattttcttctgcggagaaagtgatcacaccatttcatgaggcactttttacagccacttcggcggtatgtgttacaggtcttgtggtaaaggacactggaagctactggtccctggcaggccagacgatcattcttgcactcatacaaacaggtgggcttggagtagtgactgtggctgcgtctgtttcccttctttccggaaagaaaatatccctcatgcaaagaagcaccatgcagaatgcaatttcagctccaaaagtcggaggaatcgtcagactaacaaggtttattttgaggggaacatttttgatcgaagctgcagggacggtgttgctgctgccggtttttatgggagattatggaaaaaagggaatctggatgtcagtttttcattcaatctctgctttttgtaatgccggctttgatattctggggacagattccagtatgtttccatcgctgactaggtattccggaaatatacttataaatctggtaattatgctgttgatcattacaggaggaatcggttttctcacatgggatgatatttatacaaacaaactgaactttaaacgctaccgcatgcaaagcaagatcattctcatgactaccgcatgtctgatcttatttccgacagtttttttctatatctgtgatctgacaaaattacccatggaaaaacgcctgttagcagcagcgtttcaatcggtaacgacaagaactgccggatttaatactataaacatttcagagatgagtgaggcatcaaaagcagttatgatattgttaatgctaattggtggttcaccgggatctacagcaggtggaatgaaaacaacaactttttcagtacttattttaaatgcaattgcgacatttcgaagtcaggaaaatgcaggagcttttgggcgaagacttgaatatcatgtgataaaaaatgcagcgacaatagccatgttatattttgccttgttctttggcggcggaatagcgatcagtgtgtacgaaggccttccgcttttaaattgtctgtacgaagctgcttcagctgttggtacggtagggctgacgctgggaatcacaccggaacttcatgttttttcacaagtcgtgttgatcatactgatgtatctgggacgtgtaggtggtctgaccctgatctatgcggtattttccggaagaaataagggaaatgcaaagctccctctggaaaaaatcacagttggataagaaggagaaaaataatattatgaaaaatgtattgcttattggacttggaaggtttggaagacatattgccatgcagctcaatcagctgggacatgaagttatggcagttgactggaaggaagaaagagtggacaaagtactgtcatttgtgacgaatgctcagattggtgacagcaccaatgctgaatttttacagtcccttggaattggaaactatgacatttgttttgtgaccattggagagagctttcaaaattctcttgaaacaacatcccttctaaaagaactgggtgcaaaattggtgatatccagagctgaacgtgatgttcaggaaaaatttcttttacgcaatggtgccgataaggtagtttatccggaaaagcaggtagcaaaatgggcctccatccgttatacagatgatcatatcctggattatatggaggtggatgcttcccatgcaatttttgaagtggaagtgccggaagaatgggttggaaaaacagtgggtggacttgacatcagaaaacgctacaatattaatattctggcagtaaaaaatgaagaggaattcagtattgcaatttcaccggaaacatattttgcagaaaatgataaattactggtattaggagaatacagagctcttcagaagtgcttccgcatatagctcattgccatgaagaaaaaattttgaccacagaacagctgcgtgatataattccagaaaacagcagtagaaggagaatgacagaatgagcttgaaaatggaggatacagtaaaaaacagaacctatccgaaacggccatttgcatggtatgtggaaaaaccgtctgcaaaagattacttgctgacggtttttatatttgcagtatgcactttgatcggcctgctgtttcagaaactggatcttacagatacaaatattgtaacgatatacattttgggcgtattgatcacttcgatcgtgacagatggttatctttgcagtgtagccggctcctttttaagtgtattcttattttgctttttcctgatggagccaaggatgtcttttgagacatatgcggtgggatatccggtgacatttttcataatgcttatttcgtctgtacttacaggaacccttgcggcaaagctgaaaatgcatgcaaagctgtcttcacagattgcctttcgcacacaggttctgtttgatacggatcgtctgctgcaaaaggcaaaaagtgagacagaaatcctcggagttacctgtacacagctgatacgcctgttaaaccgcagcatcacggcatatgttgtggaaaatggaactttatcagaaggaaagcttttttccggggaaaaagagagcacagaggattttctgacacaggaagaacaacaggcggccagatggacttatgaaaacagacagcgtgccggcgcatccacacagtatttctcacaggcaaaatgcttatatctggcaattcgaagcgggaataatgtttatggcgtaatcgggatccctctgcagaaagaaacactggactcttatgaatacagcatcctgctgtctgtaataaatgaatgtgcacttgcaatggagaatgtacaaaatgccatagaaaaagaaaaaaatgcggttttagcaaaaaatgagcagctgcgtggcgatcttcttcgggcgatctcccatgacctgcgtactccgctttgttctatttccggaaatgcagatatgcttctcagtaacagtgaccgtctggatgaagctacaaggtatcagatctacacggacattcatgaggattcagagtggctgatcggagttgtggaaaatctgctttccattaccaggctcaatgatggaagattgaagtttaaatttacggatcagcttttggatgaggtaatagcagagtcactccgacatatcggccggaagcatgatgcgtataagatcgtggcggactgtgaagaacttgttcttacacgtatggacgtgcatcttattatacaggttctggtaaatttgatcgataatgcgataaaatatacgccgtcaggctctgtcatcagcattcgggggttcaaaaaagccgggaaagcacaggtaagcgtggaagataacggccccgggatcccggatgaaatgaagccacatatttttgagatgttttatacagggaaaacaaccgttgcagacagccaacggagtctggggcttggcctggcactttgccgctctatcatagaagctcacgatggaacactggttctttcagatcatgctccgcatggatgtaattttacttttactttaccattaagcgaggtgacattaaatgaataagacattaattctggtggttgaggatgacagacccatacggaacctgatcgttaccacattaaaaacacatgactataaatatctggctgcagaaaatggagcttcagccattttggaggcttcatcacacaatccggatatcgttcttctggatctgggccttcctgatatggaaggagtagaggtaataaagaaaatccgtacctggtcgaatatgcctatcatcgtgatcagtgccagaagtgaagatatggacaaaatagaggcactggatgcgggtgcagatgattatatcacaaaaccattttcagtagaagaattacttgcgcgtatccgtgtcagccaaagacggcttgccataacgcagtcaggaaaacagccggaaacatctgtttttgaaaatggtggattaaagatagattacacggctggctgcacattcctgaaggacagagaactgcatctgacgcccattgagtataagttgctctgccttttatcccgtaatgttggaaaagtattgacacatacatatattactcagcagatctggggacgctgcgcggaaaacgatgttgcttctctcagggtttttatggcaacactgcggaaaaaactggagcttgaaaaaaacggtgtacaatatatccagacgcacataggaattggatatcgcatgctcagaatcgagaaacctgagcaggaaaccaaaaaagatagcattaatcctcaaacgataatataatcatctcatatgatgacagtttttttctatagtaaagatcacagaaaaggacggaaacagacgatgaagatcatggggattgatatcggcacaacaacagtcagtgtcgtaatgacagatacagaaacgggaaagctgcttgcaaaggaaacagtggagcataattcttttctgcggagcagtaagccggaacagaagctgcaggatccggaacggatctatgagatcgtccgggagcttcttataaagcagcagaaggagaatggtttgccagatggaatagggtttacagggcagatgcatggaatgctgtatgtggatgcttccggcaaggcagtgagtcctctctatacctggcaggatggaagcggagagattccgctggaaaacggaaaaacctgtgcagagcttttgcagggagtaggtgcggcggcgtccggatatggtgtagtgacacatttttatcttcagaagaaagatcagatcccgaaggatgctgtaaggatgacgacgatcagtgattatattgctatgcggctgtgtgaaaatactgtccctgttatcggacttgacatggcggcaagctggggctgctttgacctgcgaaaacaggagtttctgtatgaagccctggagcaggccggcgtagatacttcttatctgccggaagtaagaaagggacattttttagtcggagaaacaagagccggtgtgccggtaatgggatcaatcggtgacaatcaggcgagtctgtttggttccgtccgggatcttaaagataccgtactcctgaatgtgggaaccggcagccaggtttccttagtgacagagaagtttatagaatgcagcggcagtgtggagcttcgcccctgtaccgaaaacagctatatcctcgtgggagcttccctgtgtggtggtcgtgcgtatgcgatgctggaacagttttacagagaaactgcagaaactgaagaaagactgtattcccggatgcaggagcaggcagaaaaatttattgaaacatacggaaaagaagctgcatggaaagtagacacggctttttcagggacaagaagtgatccgtctcacaggggcatgatcgcagggatcggtgtagagaattttcatcctggtgcactgacggtcggtgtgatctgtgggatccttaacgaactgcatgagcagtatgagcagatgtgtcagctcaccggaaaaaaggtcacacgcctgactggctccggaaacggaattcgccgaaacccgctgatgagaagactggcagaagaaatgttcaaaatgccgatggagattcctgaatatgaagaagaggctgcatatggagctgcacttactgcgggaaagttggttgcggcaatgtaagaaaaattttgtttgactttttgaaaaagaggcaatataattacaagaaacgagtagcaagtaagcgtaaatccagtttaccggctactcgttttcattttgcaaaaatgaatatcgccatgaaaaagtgtgtagcgtgtcagcgtaagtccagcttatatgacaaggtgcgcactttttttgtgctaaaaagaaaggagttaaaacaaaatggcggaaagcaacaagatgaaggagatgccggtaaataagctgatggtccaaatgggaatcccgatgatcctatctatggcattgcaggcagtctataacattgtagacagtgcatttgtgggaaatatgaaagcaggcagtgaggtagcactaaatgctttgacactggtatttccggtgcagatgcttatggtggcagtggggattggaaccggtgtaggaaccaatgcacttcttgcaaggacacttggacagggcgacagtaaaaaagctgcaaaggtagcaggaaacagtctgtttctgggagtgatcatttatgtggtctgcttattgtttggtatctttggggtgaaagcatatatttcatcgcagacagtagatacagaagtacttgagatgggaatcagctatctgaggatatgctgcgtaatttcttttggtattattttcttttctctatttgaaaagttacttcaggcaacaggccgttctctttattccacgattggtcaggtggttggagcggttgtaaatatcatccttgatccgatcatgatctacggtattggaccttgtccggaaatgggagtgaaaggcgcagcctacgcaactgtaattggacaggtagcgtcagcagtattactgttcatttttcatatcaaattaaataaggaattcgagcatggggcgaaatatatgaagccagatggtgaaattatcaaggagatctatgcaatcggacttccggcaatcattgctcaggcgctgatgtccattatggtttatgtaatgaacctgatcctgaagttcgatccgtcagcacagacggcctatggtctgttctataaggtacagcagtttgttttgtttcttgcttttggtctgcgagatgcaatcaccccaatcattgcatttgcttatggaatgagaagtaagaagagaattcaggatggaatcaaatatggtctgatctatacaattgtgttaatgattctgggaattgcaatcacagagattttccctggggcatttgcaacgctgtttaatgcgggacagtcgagagaatattttatcggagcaatgagagtgatttctataagtttcctgttcgcaggaatcaatgttgcttatcagggcatttatcaggcactggatggtggtgtggaatcgctggttatttcgcttttgagacagcttattattatcctgccgctggctggaatcttttctatgcttgtcagaaatgtacagatgggagtttcactgatctggtgggcatttccgattacggaaatagtttcctgttttgtaggatatgtatttttaaagagaatcagaaaaaataaagtagatgttttgaattaaggaggaactggaaatggtgaaaagaatcattacgatcagtagagaatttggaagcggcggacgctttatcggagaagaattagcgaaaaaattgggactcgcttattatgataaaaacattatcaatgagatcgcagaaaagtctggtttatctccggaatatattcaggaaagtgcggaactgtctccgaaaaaaggcttgtttgcatatgcatttgccggacgtgatatcacaggaaaatcagtagaagacatggtgtatgaggcacagagaaaggttattttagaactggctgataaggaatcttgtgtgattatcggaagaaatgcagattatattctgaaagatagggatgatgtactgaatgtatttatccatggggatatgccggaaaaaacacagcgtattatgggtttatataatgtaggagagaaggaagctgtcaaaatgatggcagatacagataaaaggcgtatgacgaattataatttttataccgatcagaaatggggaaaggccagtaattatacgttgtgtctgaatagttcacagcttggatatggcagatgtgagaagcttgtcatggaatgtagtaaataatgaaatcctcatggtgaaagtggattaaagaaaatgtgataagagcattcatgagtaagtagcgaaagcggattgcgaatgtcctatttatataacgtacacgaatgtaaatggatatctgatcctgaatctcacctataaatccggtgagcagatggagcaacttggcaagcatatcatgttggtgcgtctttgaaggacgcaggtaaaaaatgttttggaattaatctgattgaagatgcaggtattgtaagagatattttaaagagagtggaattagaaacagaagaatagaaaagtaagttatgcagaaaggcgtgagtcataagaatatggcttgcgtctttttctgtctggaaaggaagtgggggagcatgtaaattattattttaatgaccagatgagggtataaattgcattccaagtgcagtgaatataatgcgcatgaacatgaaattttaaatattatgaagacaaaatttggttgattaaccaggtaaaagtgatatactgaatgcataagaaaagaaaccgtgtggaattacagttttgttttcacacggttttttagaaaatgagagttagacattactaacatgaacactggcagtttttttgaaaatgaaaaagaggacggatttctatgagaatattgatttatggtgcaggtgtgattggatccttgtatgcggtcttatttgcagaaactggttatgatacgagtatttatgccagaggtaaaagacttgagtttttaaagaaaaatggactgctttataagaaaaaccagaacataaggcgggcaagcaccagatgaaatgagggagctgcataagtaattttatgcttatatgaaaaaactaaaggaggccagatatgaaattttatgaaagtggagacagtagtaaaccagtgatatttttatttcctggtacctgttgcctgtatagtagctttgatcatatactggatagattacatttttatttttacacggtaacagtttcttatgatggatttgatccaaatgagaaaacagaattttattcaatggaagatgaatgcgaaaagattgagcaggaaatcaagaaaaagtatgatggaagaattaaagcagcgtatgggtgttcccttggaggaagttttgtatcccttttgattcagcgaaaaagaattcatatagatcatggcatcattgggagcagtgatatggatgaagctggtcagtttatggcgaaaattcagtcatctgtagttgtgccgattatgtataaaatggtgcatactggtaaattgcctaaatttatgcaaaagaaaataaatgaagcagataaatcaaagaaagaaatgattgatggatttttaaatatgttcggcattgagcagggaggaaatccatggattacgaaacagagtgtttataatcagttttattctgatctggttacgaaagtccagcatggaattgatgtgccgggaactacgatacacgtgttttacgcaacaaagatgggcagaaaatatgaaaagagatattgtacttattttaaaaatccggatattcggagacataacatgcagcatgaagaactgttttgctgtcatagtgcagagtgggtggaagaagtaagaaaggcagtggaaggcgacagataatgaaagaaaaagtgaatgtgacaggtgtgccggaaacgatggtacagactctgtatgcaagagcaaaagaaacaagaaagaaaaatgctaaaataaacgacgaaattgcagaagaacttgtgaaaaatcttgattatgacttttctaaagcggataaagataaagccatgaactatggcgtgattgcaagaacaattgtattagaccggatggttgagcaatatttggagaaaaatacaaatacaattgttataaatattgcatgtggactggataccagatgttatcgaatgaaagggaaatatctgcattggtacaatatagatttgccggagactatgaagataaggcggcaatttcttccagaaacaggtccgatatatcagattgcaaagtctgcaatggatgattcctatgtagatgatatagattatcactgtgagaatgttctggtaataatcgaagggcttacaatgtatttgtgtgaaaaagatatcagaaagatgttttttattattgaaaaatcatttcaggaagtaaccgtaatggtcgaaaccatgtcaccttttgttgtaaaccatgtgaaagaaaaatccatagagggaagcaatgcaaaattcacatggggagttaagaacggaacagaactgcaaagaattgtgccgggattttctgttcaacaggaagtcagtctggttgaaggaatgaaaaagcttatgccgatttatcatgtgataggaaagattcaaatcgttcggaatatctcaaacaaaataatagttttggagaaacgtggccgatattaaagagatgatacaaatgaagaaaagacattttgatgtggaaacagatggattttatggtgcatactggaaatgcaaaacaggatcagactgtgcaatgattgccatgatcggggatgatccagaggattatctggcgcgtacatccgtgaaatggctacataaactcggtgtgaatgtgatgacaatgtcacctggaaaaaaagattatggacatcataattatccattggaacgtatagagaaagcaatcaattggttaaaagcacatggtgatcagaagataggaattgtcggggcatctactacaggaacactggcattgactgccgcttcttattttgaggatattacattaacgataggtctgacaccgagtgattttatctggcaggggtttatgcagggcaaaaaagatggctgtaaggaatggccgattgaaggagaatctcttttttcttacaaaggagaaccccttccgtatatgccattttgctacaaacatccggattactggcatgtgattaagaaagaaacaaaacggaccggtgatatgattaattcaagaaaactgtttgatgactcggaaaaggctcacccaatcacagaagacgagatgatcaagattgaaaaaatccatggaacgttattgctgattggtgcggaagatgatgtgttgtgggatactgcaaaatatatccgccgtatgaagcagcgtatgaaagaacattcacacacatgcagattggattatgtcatttatgagcatggaacccatttcgtttttccggagagcatgctaaagacaatgctcccggttggatccggactctttgtgaaactggcatttcaggcagcaagaaaacatccgaaagaatgtcgcagagcacgtctggatattgactggcgggtaagaaatgctgttgcaaaatggaagagagtagatagataaaaaatagacaaaaggtggaagtgtggtatttaaaacaacaggaaataaatcaaattcagtcattctgtttttccatgcaatgggagtaactggggaaagcagtatgccggttgcagagaaaatggcagaaaaatattattgcattatgccaacatcgactgtgtattgctccggacagaggtatcaaagcaaaagagatgagatacaacagattgtacgatttttggggaaccatggaatcaaagaaatagaacttatagttgcatcttcgattggagcagatctcgccatggcattcctgacagagataaaaataccggtaaagcatgtttttttgatggcgagcagtttgcacagattggaaaggcaacacgcagaatcatggttccgttcttatatatagcaatgaaaagtttatattggtcaaaaggaaagacactaaagagaatcatgtggtgtgacgatgataaaattaaaccttattttatagaggcaggaaagaacttgacgtatggaaatctgagaagacagctgacagacagtttggaagataagccattttcagaattgtcagaagaattgcagaaacatacattctgggaatttggaagtatagaagaacattttaaatacagaaatgcagtgatgcagacttatatatacggtaactttccggtttttgagggattcaaccatatgcagtatcaaattcaaaatccggagggatttgccagaatgctcgaaacaattattgagactgaccgattaccggaattggcatttgcgatgtggtacagaggaaaatagttatgaaaaatgcttatgagcttgctgaaaatatattgaagtccaaacccgataagaatatagaattaaaatcatcagattcttttgccagtattgagttatatggtacatcagcttgcaaaaaggtacaggatacggaattctgtgaatgttttcatttggaaaatgagagcggtacaggaatgattacattgtatcatgtgtttccaggaattgatctggtttataatgatatacatatggagtattgcaacaaggagcaaaagccggcttccagtgtgatggaaataaactattgcatggaaggccgttgcgaatgcgtgtttgaacaaaatgaatatggttatatagcggcaggagacttgtcattttgttctttgaaaaaaactgggcatgtgtcagagtttccaacatcgcgttatcatggaattaccattacgcttgatttttccatgattacagacgaaatgaaaaggatactgcaattattgtctgtaaatctggaaaagattagtaacatttcaaaaacacatagttttactattatacgggcaaatcagtcaatagaacatatctttttggaattgtataaaattcctgaagaaatcagatatggttatattcgtgtgaaaattctggaactattattagtattaactggatttgatttaaagaaaaataattctgagcatgtttctgcatagcaccagatacaaatgatacaacctatcatattgaattgcgctacggcagtgatttggaggcacttggaaaatatgatgaaggagactatgcatactggcttggctcaggtatttcaacagactatgatcagacaatggttgagaactgtatagaacttttctgcaaagaaaatctgtctgaatagaacagacttgtaaaactgcagaaagcatctgcggagtggaaactgaatacacgagaaaaataaaaaattgaaacaccaagacttgacaaattcctgtaatgagttaaaatataacagtgttatatagcactgctatattttgggaagaagtttagaggatacgaaaagaatgtcgacgaaagcagaagatacacagaaaaacatattagatacagccagaaaacattttctgaaagatggtttgacaggagcatctttaagaaatattgtaaaagatgcagggcttactactggcgcattttacaaatattatccgacgaaagaggcactttttgatgcactgacggatccttatatggaacatatttatcagatttatgaccagatcgttgaggagtttgaaaagctttctgccagtgatcagacaaggaatatgtcggatacatccagtgatgggatggaacagatggttgattatatctatgatcattatgataatttcagattattgttgaaatgcggagacagtggaaaatttgaactattcatacacaatatggtagagcgggaaatgaagtccagcctgaattatatggaaaagatgaaagagaacggtgtgaaaataccgattgtagaggaaagccttatgcatatgatctatacgggatttttttcatcagtatttcagatcattgagcatgatatagatagagagattgcaaagaaaaatgtgcatcagctgaaagaattcaatacaggtggctgggaacgattgtggaatattgaatttccggtataacggatgcaagaatcctgaacaggttatgtgtgttacaggttctggatttctgaataagaatccgacaggataataatatcaggtggctgatgccaataggccgcctattttattatacatgggttagactaaactaacaaaaataacaataaaacgaaagtaaggagtgaacaaatgtgaaagaaaaaaagaagtcggcagtgagctggatcctgacatgggcgggacaaaaaagaattgcttatgtgtggagtgtgttacttgcaatagagaatgtgatttttaagattttgccgtattttattattgcagatgtagtaaagctgtttttgaatggtgaaaaggagtttgaaaaatatctggtgaaagcggttctgatcgcactgtcgtttatcattgcagaattgcttcattcactctcgacagcattgtcgcataaagcgacgtttgcagtactcgcaaatataagaaaatcctgctgtgacaaactggcacgggtacctcttggttatgtaaaggatacatcctccggcacatttaagaatatcatggtggaaagaatcgacagtatcgagacaacactggcgcatattgtcccggaattcacgtcaaatctgctggcgccggttgtgattttaatttatttctttctgacagactggagactggcactctggtctttggttccagttatcgttggacttttctcttattttggaatgatgctggattataagtcaagttttgaaagaacagttcagacaacaaaagatctgaatgatgcggcagtggaatatattgacggaattgaagtaatcaaggcatttggaaagacagaaagttcttatgccaaatttacaaaggcggcttttgaatatgcggattcctttatttcctggatgaaacggtgctcgatttttcatggactgatgatggtggtcacaccttatacgcttcttacggtattgccgttgggggcacattatgtagcgaatggaacacttgcggttcctgattttgtcatctgtattattttatcacttggaatcgttggaccgttgattacagtgggatcttacacagatgatcttggaaaaattggagtaatcgtcggtgaagtggcgggaattctggaacagccggagcttgaacgtccggagaaaagtgaaagagctcccaaagataattccgttacgcttgaaaaagtcagatttggttatcacgacaaagagattctgcatggagtaactatggagctgaaagcaggaacggtaaatgcaatcgtaggaccttccggaagcggcaagtcgaccatcgcaaagctgattgcgtccttgtgggatgtggattccggaagtattaaaatcggtggagttgatgtcaaagaaatgtcgcttgcagattttaatcggaaaattgcatatgttgcacaggataattatctgttcaatgaaacggtacgtgaaaatatcagacagggaaatccggaggctacagatgaacagatcatcgaggtgacaaagaaaagcggatgctatgaatttatcatgcagcttgagaacggatttgatacggttgtagggggtgcaggaggacatctgtcaggaggcgagagacagcgtatctcgattgcaagagcgatgctgaaggatgctccgattgtgatccttgatgaggcaactgcttacacggatccggaaaacgaggcgattctgcagaattctatcgcaaaactggtagcagggaagacactgatcgtaattgcacacaggctatctaccattaaggacagtgatcagatttttgttgtaaatgatggaaatgtaacagcacatggtacacatgaggaactactgatgtcatgcccgctttataaggaaatgtgggatgcccatatttctgtaaaagatacggtgaaggagggagaatgatatgtttgggattctggcaaaattctttcgtttttcaggcagggaaaatggtaataaatttaaactgtcgatagtgatcggacttatagaggctctcgcttcagcaatgaagataccggctattatgtacatattgattggtttgatgagtggaaaaccaataggaaaatatattggtggttcaattgcgatcatggtgattgcaattgtagttgatgtcatctgtaagagatactccacagtgcttcagacagaaggcggatataatgcgagtgcttttatgagaatcaagattgcagaacatctgcgttatttgccgatgggatattttaatgccaacagcatcggggaaatttcttctattacgacgaatacaatggaaacacttggcgatgtagctgcgagagtggttatgctgaccatgcagggaattctggaaacatccatgatcattcttatgctgtttctttttgactggagaatcggactgatagctgcagcaggagtacttattttctttggggtcaattctgtgatgcagaatgcgggtaaaaaagattcagagcaaaaagtggtatgcgatacggagcttgtaaaccagatcatggagtatctgcagggaatatcagaagttaaatcatataacttgcttgggaaacaggcgaaaagattaaatgatgcaaatgaagcatgtgaaaagatcaatacaaagatggaaatgctgtttgtgccctatcattttctgcaaagtgtgataaccaaaattacaggtgctgtgatcgtagcatgcagtgcatatttttatattaatggaactatgagtgcggtctatgcgatcggtatgacaatttcagcatttatgctttatgccagtctggaatgtgcagggaattattcatctcttttacatgtggtaagcgtatgtgtagataaagcaaatgcaatattggagctggataccatggatatcgacggtaaagaaatacagccggaaaattacgatatcagactttctaatgtttcgttttcttatgacaaacggaagatcattgatgatatatcgctctctattccgcagaaaacgacgacagcaatcgttggaccatctggtggaggaaaatcaacactttgcaatctgattgccaggttctgggatgtggattccggggaagtgacacttggaggtgtgaatgtaaaagactacagcatgaacagtctgatgcgtaatttctcatttgtgtttcagtcggtgtatttgtttgcagacaccattgagaataatattaaattcggacgccaggatgcaagtcatgaggaagtggtggaagcggcgaagaaagcatgttgtcatgatttcatcagcaaacttccgaatggatatgacacagtgatcggagaaggaggagccacactttccggtggtgagaagcagcgtatttccatagccagagcgatcatgaaggacgcaccaatcgttatattagatgaggcaacagccaatgttgatccggagaatgaaaaggagctgatggatgcagtagatgcacttacaaaggaaaaaacgattattatgattgcccacagattaaaaacagtcagacatgcagaccagattgtggttgttgaaaaaggaagaattgcacagcagggaacacatgagcaattaatgaaacaggaaggtatttataagagatttgtggatgcaaggcagcaggcggtaagttggaaactggtgcactgagaaataatccacagttggtgaatatccaaattgaattgtctgaaagagatttaatttaagtttcgctaagtttcacttatataggcagaatgagggatattcaataaagtaatatgaaaaaagcactgaaaaccgttggattgatatgctccccatatggtagacaatggaaatatccaaaaatctatcatatgaggagcatatttttatgtctaggaaacagtatagtaaggagttgaaacttgagctcgtaaagaaacaccgtccaacaaaagaacataaagggctaaatgtagaaattagtttttcattttacagttgcaaaaaaataacacaaaaattagcactcacctcttgataatggaagtcgatttttgtcctgtcttgtgtatcctagaagtgcctgttttacaggctttccggggcatcagtcattttgtctggtattgtaaagcagtgtcagatttgtcgtaaatgtcgtaaatttgtggtcaaaaaatgatgagaaatggagagtgctaataaaatggaattaacgtatacaaatgtaaatggatatctgatcccgaatctcacctataaatccggtgagcagatggagcaacttggcaagtatggttttcttcgcagagattatctgaaaaactatcgaaattcaacctatcaggtgatgcttttacaggataccattggagagcatcttctggaagtggacaaggcagccagagaacgggaagaggtaatactgaaacagttagaagaaaaagaaccattgccggataaagaagcagatcagatgtcatgggtaagagctgctaatcagcacagagcgattgcggaagagattattctgaaagaattgatttatgtataaggattgccagtaactaatctggcaggtaactgataaaaatagaatattgtgagcgaagtaaggcgtgagtcataagatatggcttgcgtctttttcttttgaactggaaaggaggatgggagcatggcacagatttttcgtgtagagagaactaagaattttacggtaatgagtaatcatcatttcaagaataagaatctgacattgaaagcgaaaggtctattatcgctgatgttaagtttgccagatgactggaattacaatatgcaaggactggcaacattgagcagagatgggattgattctgttcgttctgcaattaaggaattagagcatcatggatatgtggaacgtcatagattgcgtaatgagtatggcttttatggcgataccgaatatattatccgggaagttccattaggagaagaaaatgattaagtggagaagagaagtgcctaagggtggatagtccaatttgggacaatcaggtcataggaaatttctatctccggacatcagaaaataggaaaactagatatggtaaatcccatactggacaaaccgttgctattaataatccatgttattaaatatgaattattaaagaaccagtaaataaaatatccatcttatcaattcacgtaagtattaataggattggataagaaaagaaagaatgaggtatgattatgagaatgatgaaaaataacaaaaatgaaacagttatggtgatcgggattgatcatgggtatggaaacatgaaaactgccaccagatgctttccatccggtgtagccagatatgacaaggagccaatcttccagaataatcttcttgtttacaatggtatgtattaccagatcggagaggaacacaaagagttctgtgcagagaaaacgcaggacgaggactattatgtgctgacactggcggctatcgcaagagaacttgatgggaaaggaatgaatcgggcaaaggtacacattgtagccggacttccccttacctgggtagctacacagaaagaagatttccagaaatatcttcttcagaatgaaagcgtggattttatattccgcaataaagagtatcatgtagagtttgcaggcactgatatttacccacagggatttgcagcagccttttaccgcttacaggatttcaaaggaatcaacatgcttgtggatattggaaacggaactatgaacatcatgtatatcaacaattcccgtccattagagaagaaatgctttacagagaaatatggaacgcatcagtgtgtgcttgctgtaagggaatccctgctgaaagaactgggaacagtggtggacgatctggtgattgagcaggtgattcgtaccgggacagcagatattggtgagaaatatctgacaggcattcgtaaagctgctggagattatacgaaagaaattttccataagctgagagaacgggaatataatccagaactgatgcgtctgtatgtggtcggcggtggtggttgtatgatccagaattttggagaatatgacaagagccgggtgacaattgtacgggacatctgtgccacagcgaaaggctatgaagcaatgactgtaaggaaaatccagagaaacggagggatgcttgtatgagaaaagaacggaaaatcatcaataccaatatccgtttgaacctttgtgatgaacaggacaggctggcatgggaatatttgcagacgatggacagggaaaaatataaatcgtacaccagagcagttgtagttgctttaaacgattatttttccagagagtacaggaatgaagcagatccgtatctggaaaccagagaaaaggaagatgcgtttttggaaagagtggaaacagctgtcagggatggagtgaaagaatccgtcccgatggctatagcgaagaatctgatggaaatgcttgtaccgtttgtaaaagaatcggtaggagaaattaatctgccggacagaacactaacaatggagaaaacggatggagagatcgcagaagataatctggactgggagaaagaagctgatatggatgcagcactggattttgcagacagtttttagatggttatgaaatagcagtaacaggaaaacagactgacagtaaggaatagctttacgaaaacagaatagcagaaaaagacaatggcagtggtgacatttcagacattatgaattggagaaatgtttatgactgctatttttatgttttttagcagaaatggaaagagatccagaaaaagaaagacagaaatagcaggaacatataacagaaaagcgttggcagatgggtggattgaacaagcaaggcgaagaaaagaatagagtgccggatacggcacatgattgtccgatacttcgcatcggggtgatgcaggaacagcctgttttagaaagagaaaatctatggaaatgggagcttttctatttcttccacagtctgtccctgcaccacaaaaccaccgtcatctccatttagggttgataatgcagtgtggaaatgttgcttggctggtatcggtttagtagtggggagatgacaggcaagtttcgcaaagtggcaagccactatgcaccggagccagcctttgggctgttcctaaacttgccagagggctctgccccttggaaccctggcacgccaatggtggtaattctgtgttagaaatatccactggatacttcttctcagattgccacggattggctaagacgttgtcttgcatctaccaaaggggaacgttacacatccccttatggaatcccctgttaatttagacataacgctgtggttgtaaatatagagcagaaatcaagcagagaaaggaaataaaagcctatgagaaaacgaaatcatacagtaactatacggatgaataaagaggaatatgagttgcttcaaagcaaagtaaaggaatccggaagaacacagcaggaagttgtaataaaagcaatcgcagatttgaagatagtttctgcagaggaagtggaagaactgaaaagattgaaccagatgtttgcagatattctcagtcagctccggggagctactacaaatatcaatcagattgcaagaaagctgcatacagatggagaagttccaaatgacagtacgctgtatttcctcaataaaaatattcttaagtaccggaaggagagtggaaagatatggctattaataagacgattaataagcggacaaatacacatggagcaatgagaaactgcatcgaatatgttttgcgacaggacaagaccaacgaattatttacctgtgtaacaggcccgtactgtcatgacgagatcaattatgatctggtatacagaacatttttagaggaaaagaaagtgtgggataaagattctgggagaatgtacgctcacaacattatttcctggcataaggacgagcagattactccggagcaggcattagaatttggaaaagagtttgcagaaaatgggttcagtggattccagaccttagtggctgtgcataaggataaagaccatatccactgccatctggttacaaattctgtgagttatgaagatggaagaaagctacataataccagaaaagatctggaatgtatgaaacagcttaccaatcagatgtgccgagaacgtgaactgacagttgctgagaaaggaaagcactttgatggaagccagattgaaaaaggggaagtcattgcatggagcaaagataaatataacctgttccgtcagcaggtgaaagacagctttgtagcggattgtgcaatggcagtgttaaaagcactggaaaattgtatcagtaaggaaaagtttatagaaaaaataaagcagttcggatggaacgtaaactggacagagaaacggaagcacatcacatttcagaatcaggatggaaagaaagtgcgagacagcaatctgtcaaaaacatttcatctggatatcagtaaggaggacttagagaatgaatttgatagaaattacgaaagggtgcgagtcgaagcagaacgaacaaacggagcagatgaagagcttgccggatattaccgacaagtggaagcagcttgcgaaggagcaggtggcgtcactggagctagtgacggaagagagagacgagttacaggtgagaaatcagaaggtgaacgagtttatccagaaatttcaggaaagaacacacaagctgaaaatggaaaaacagaagctattcttcgagaatcacgaaatgcaagacgaaattcatcgtttgacaatcgaactgtccgaaaagcagaagctgaatcaatcgcttcagcagagcaacgacgatttgaggaacagaaacggcttgatgagcaggagcgagcaagagaagctcgaagaagaaataaaagacgttcgggaccagaactctaaattacaggacaaagttaataaatcatctgttgaggctgtggatgaagcacagaagaaacaagaagaagcggagaaaaaggctagaacaatagaataccagtttaataaggcacaagaagaagtaaagattgtgaagaaaaaaacagattgtgaaataaaaaagttgaaaaatgaagcgaaagaaaaggaaacattctggatgatagcttatatgatcttggttttgttggcagtaataaaaaatacagtatttcaaaaagatctatttgcttgcataactgttccattgaggttttggtatagatatatagagtggttaatccatccatcagaattaaatattttaggtgagcgagagtatttttcagcaggatggtcgtggtttttgagaattatggctattcttatttttcttggactaggaataagtagtgagatatttgtgttgaggaagatagagcagtatcgaaaagcatcggataaatattctatatggattctgcttatcagcgtgtcatcaattgctgtaataggtgatgtagtgagaaaatattttccgataaatcttatattactcttgggaattataaatattgctgctatggaaataaaaatctactgtcataataaaggggaattatattaggaatatatccatggttatgaaaaaccaaatttgattattgacaatcaaataaacaaatgctatagtgaacacaaggaaattgattgtgaataaccaaaggaggaaacagggttgaatatttcagttaaagagttaaaagaaaaagaaggctcgaaagttgaagagattagttggaatattttaaataggatgagagaacttggaaatacatccgtatatggaggcttttgcttatcgtatgtagcgtatttatctttaaaaaataagataaacgatgtatatcagttagtagaatatatggaactgactttttcaccggaaagagtcagtttcataaaaggaaatattgaaaatttatggaatatggcaatagaaataggagaagcatattcggaagaaacacttttagcagtagtattgtggtggccattgcaaggaaataaattcatgggagaatgcgaaaccccacagagtgttgtaaagttggcaaatgagatacttcaaatttcaaatgataaaacagcagatttctgtagtggaattggaacatttctagtgaatgctatagaaagaaatccagaatcacagttttatggtgtagagcttgtaaccgaggttaaagaagtagcagaaatcagaacggaattaatttctgatcgggtgaaaattgagcaaaaatcagttctggacatagatgacaatttgatgtttgataaaatattctgtgattatccttgggggataagggtgaaagagagcattggaaacaacgaggaattagagtcgatatataatattataccggaagtacagaaagcagctgcgggagactgggtatttattataaatgtcatgaatcatctcaacaaacatggaaaagcggttgtttcggtgagtaatggagtgacttggaacagaggaatcaatacagtaatccgcgaaaaatttgtaaaaaaaggatttgtcgaggcggtgatagcacttccatccaatttgtattcgaatacaggaattgcctgttcattactggtattaagcagaaacaataaaaatataagaatgatagatgcaacggagatggcatctgttggacgaagacagaatgttcttagtgatgaaaatatttctaaaattattgaattgctgaatacagatgacgataactcaaagctagttttaggtgaagaggtggcaaaaaatgaatacactcttaatccgtcaagatatcttcaaaaagagatgctcataaaaaacggtgtagcttttgaatctgtgataaagaacataacaagaggagcacagattaaagcaacgattttagatgaaattgtatctgatgaaccaacgaacatgcagtatttgatgttggcaaatatacaggatggtattattagtgatgatcttccttatttgaaagaaatgaatcctaaatacgagaaatattgtattaaaaatggaagtctcgtaatttccaaaaatgtatctccggtaaaaatggcaattgcatccgtaaaagaaggaaataagattttagcgaatggtaatctttatgttattgagttagatgaagataagataaatccttactttttgaaagcatatttggaaagtgaaaatggaaaagcagccttatctagagtagcagtaggagctacattattaaatctgccggttgaaggattgaaaaaaataacaattccattgcctgacttaaaaagtcagaagataattgcagataaatattatgccaagataaatgaaataaaagaattgaaatacaaattggaaaaggcaacagcagaattagaacatatttatacggaggaaaaataaatggacgaaaataataaatttgatgtagttggaactaatatagcagagaaagcgacaatgatctggaatgtagcagatatgctccgtggcccatttaaaccgcatgaatatggattggtaattttgccaatgacagtagtaaaaaggtttcatgattgtttattaccgacacataaagcagtattggaacagtatgaaaaggtgaagaattttgctgtaattgatggatttctgacaaaagcttccggttatcaattttataacattagcaaatatacatttgaatctttattagctgatccggaaaatatcgaagcaaattttcgagattatctgaatggattttcagcaaatgttcaggatgtgctggcaaagtttgattttgataacattatccgcagaatggtagaaagtaataccttgtatcttgtcataaaagaatttaattcacaaaaaggatatctgggaccagataaaatcagtgcagtagactgtggatatatttttgaagatttagtaaaacgattctccgaatcttttggtgaagaggccggggcacattttaccagtagagatattatctatttaatgacggatttacttttatcagatgcagatctgagtaagggtggaaatgtaacagtgtatgatatggcgatgggaacatctcagatgcttagctgcatggaagaaagaattcaggagctaaacacagagattggagttacctgctttggtcaggagtttaatccctctacatttgcgattgcaaaagcggatatgatgattcgtgggggtgatccaaataatatgagatttggagataccctatctgaagatcagtttagcggatatcagtttcagtatattatttcaaatccaccattcggaattgactggaaaagagaaaaagcagcagtagaagcagaagcgaaaaaaggtgaattgggaagatttgcacctggacttccgaagatatcagatggacagcagttgtttgtattgaacggactttctaagctagctcaaaatgggaaaatggctatcattcagaatggatcaccattattttcaggagatgcaggaagtggaccgtcagagattagaagatatattctggaaaatgactggttggatgcgattgtgcagttaggtacagatatgtttatgaatactggtatcagcacatacatttggatttgttctaaagacaaaccaatacacagagctggaaaagtacagttgattgatgcttcgcattgttttgaagcaagaagaaaaagtatcggaacaaaaagaaatgacattactgataaatgccgtgaactgattgtaaaggcatatggtgcatttgaaaatggaactatatatggcgagaaagatggtatttactgtcagagtaagatttttgatacagaggaatttggatatcagaagattgtagtagaacagccacagaaaagattattgatgaaataagagaaattgttgcttctacgctgaaagggaatccacgtcaggcaaaacgctttctgaatacatttattactaaacgccagttggcaaaaatttattatggtgatgaaattgatatttctattttggcgaagttgttagtgttacaaaaattggataatgacttgtttatacagctaaatgaatggagtaaagaatttgatactgaaaataaaaaattcaagcaaattcgtacagaattccaggaaggaaatatggatagtcaaaatccgtggaatacggcacaaatgaaaaagtggatagaatgtaaacctgttgacttggaaaaatatcgtttagaaaaatatttttatttaacaagagaaaatctgaaaagttctagcattgatgaatctggattcagtaaaaatacgaaagaaattttggaaagaattggacgatctaaagctggccaaatggcagctattataaaagatatgaaagaattaaatgcagaagaagttgcagatacatttaagattattatacctaagatcgaaaaaggcgaaatgaaattttttattataagagatttatttttgaattttgatacgtataaaggaaaaatagtggaggcaattggaaaatcaacagtcacaataaaagcgggtgatatggctgcattaagaacaatgtataatagtgatacaggaagtatgaatactgtattagaaataatggtaaaaaaaggaacgttaacagatgagcagattacagaaataaaagaacagaggaaaagctaatatgggtacatcgaaaggatatatagcaccaacaacactgcattggtcaaaagcgaaaagagcagtgacgtcatttataaataatagagattatgattcgaaagcaaaagctgctagtaaatatgctacagcaatgaaaacagacatgtcgacaggtggtagttttcaatcagcagctgcaagaactttaggttttgcacaaaaagttgcgtctggtggactggacaatgcattgcgtgaatataatagggaagatcttgtaggaaagccgtcagaagttgtttggacagaattactgcatgaatttacaaattctggagcatctgtagaagataatatggcagcagacgcattgtcacaggctatggataatttggaaatagaagatatatagacgagataaaaaaatattcctacaagggagaagcttatgagttccttatggcatatgaagaaagtgaaaaaagtgctgatttaagagcagtacttggaagtatttatcgttgcaaacattcttcagataaagaattaaaaagagatattaggtgtgtcggagaattaacagaagaggaagttggaaaatttttagttttatataagaaaagtatagatgatttggtacaattattttctggagatcagaggatgaaggagtatcttgggttatgattcaacatcttattgatacacacttccatttggatcattacaaggatcatcagaaaatatatgctggaattaatgaaaaaaaacaatatacattgtgtatgacgaactcacctggggtctatatgtcttgcaaacgcatgtatccagaaacaaaatacttgaaatttgcacttggtttccatccacaggagacatcattaaatgatacagatttttatagttttatacaattaatcaatgaaaccaattatgtaggagaagttggacttgatttctcaaaaaaaagttatatttcgtgtaataaacaatgtatatattttgagaaaattgcaaaagtgtgtgcagaaaagaataaattgatgtctgtgcatcttagaaaatcggaaaaagaagcaatatctattttaaaagagtatcgtcctcgtaggtgtattattcattggtttaatggaagcagagagcaattgcaacaattactagatataggctgctatttttcgctcaattccaatatggtaacaaatgaaaaaagcaaagaaaaattgtatttgataccaaaaacaagaatactgattgaaagtgatggaccgtttacaaagattgatgggaaaaagtacacatttaataatttgataaaaatatatgagttagttgcatggtattataatgaaccagacattattaagattgttcatgataattttcgagatgttctttcaaaatgatgtttaattgcaaagttagagggtgattttatggcaatacgatcagtagaatatctgcaaagtcttgtgcgagagcttgcaaagcttccagacgagacggagtgggtagaatttaaatgtaataacaagcaaccgcagatgattggcgaatatatttctgctctcagtaattcagctgcgttgtgcgaacgaccgaaagcatatttagtttggggcgtggatgacacaacacataaaattgttggaactgaatttcagtatcgtaaaatgaaaaagggaaatgaggaattggaagcatggctttccagaatgctttcaccaagaattaatttccgattttttgaggttccgatggatgaaggaatggttgtgctgatggagattccttgtgcggaaaaacagccggtacagttcgccggtggggaatttataagaattggaacgaacaaaaagaatttaaaagagtatcctgacaaagaaagagaattatggagaacattcgattctacaccatatgaactccgaattgcgatgggaaatttagatgaagatgaaatggtgttattattggattactcaaagtattatgataaactggaaatgccaattccgagaaatagggataaagtattggaagatttacagcatgaaaagttcataaagagaaatgatgctggtacatgggatatcacgaatatgggagcattgatgatcgcaaaggatttgaagaaatttgaatctttgcatagaagaactgtgagggtgatatggtataaggagaattccagactggatgctatcagagaaaaagagttctgtgcgggctatgcattttcgcatgaagaaatcgtgcagtatattatgacaattattccgcaggaagaggttattgtagaggcaacaaggaaatctgttgtcagtttcccggaaattgctatccgtgagttgttggcaaatgctatgatacatcaggatctgcagcaaagaggtacaaatccgatggtagaagtatttaaaaatcgaattgaattttcaaatgctggcgcaccactggtagcaattgaaagaattgtagattcggtgccggtgtccagaaatgaaaatattgccggatttatgcataaatgtggtatttgtgaggaacgtggaagtggatatgataagattgttgaagcaaccggtaaaaatgaattacttgcaccgaggattgaaaatcaaaacaatcaatttacaaaagcaatattgtttgcgaaagtaccgtttgaattaaccacgaaagaagatcggatgcgtacttgttatatgcaggcatgtctggcatatgtcaattttgaggggatttctaactcagatattcgaaaaatatttggattgggagaaaaagagaaagcgaaagcatctcgacttcttaccagtgctgttgacggaggctatattaaagtaatggatccggatactgcaccaagatataaaaagtatattccatattgggcataatctaagtttcgctaagtttcacttatgtaggtgtctgagggaaattcaatagttaaaacatgaaaaaagcactgaaaaccgttggattattggttttacagtgctttttcttttactaaagagaaaaaagcagtgaatttaagttttgctaagtttcactgagttctgattttacagaccgccattgtttcttaggttcatattttccacaaccatcacaagtctgtggccagttgattttccattcaaaatattcatctctggtaatctcaccggatttcagttcatccattcgaaccacccattcttttagaaaatcattcagaactccataatcaaaccacatacagacaggagcatgagccggccagctatcattgtcgtgatagtaaacggaagtgtctgctacttcattgcatttttcaccaggaaatttccgaggaagaaacagatgcagggcagatggattaaattcatccagccagaaaagcagttccatcatttcggaagcgtcacgtccagcggtatcatagagggtataaggattaacatcaagagccttagccattttatcaaccagatctttttttggaacacgaacacctttttcatattgtacaattctatgctgatcggtcagtccgatcttctctgacagttctttttgtgtcattttccggaatgtccggattttttttagtttcagattaaaattcataaagtcacctctgcattagtcctgataaacatccatagaagatagtaaaatcaagaaatgaataactatttgtccatattataacacaaactagcagaaaatcaataaaaaagagtacaaaaaagaacctaaaacgcatgaagtgctattgacattagcagtaacgggggatataatggcattaaatcaaataggtacaaaaatgtatacctacaaaaacttttgattattgaaccttgaaaattgaatgagctgtatgggtgcctttcgggcttaaaggtaacacaggattccaccgctgtatcagagagtagtatgtggaaaccgaagatactccggcaacggctggtatgcttgagaagaagctgccagtattcagaaagatttctgatagaggtcaattgtaacgttgacaccgccatataccaatggaagccaatacgccgaacagaatggaaaatcatcgtaagaagtccaaacaaaaagtatatgtactgacaacgggcataaccgctgtctgggaggtgatgcagaagaatacggaggaaaggaggtatgtgcatcatgagaaaaacaacagagtataaggctgagaatcgtctgacggtagatattgaaggattaatggcaatgttatcctgcggagaagtaactgcaaagaaaattgcagattatgcagaagcaagagtgattattggaagacgtgttctttataacgtggataagataaaaaaatatattgatgcaatggcagtgtaatgaaagatgagaggataaaatacaacaactttccttcggaatgaaaagtaaaaaagggaaaaattcctgtaaacaaggcagataaaaattagcattttgcaggaatttacccttggaaatcataaaatattatgttaatctgtgagcagatatcagacagtaaatgactgataccgacaggacaaaaatcattccgaataacgaaaaatgaagtgaaaggaatgattgatatggcaagaaaagataataaaggcagaaatttaaaaacaggtgaataccagcgcccggatggacgttatgagtatcgctacaaggatgaaattaccggaaagcgtaattcggtttatgcagctgatctggcgagtctgcgagaaatggaaaagaagatcaataaggatatggatgatctgcttattacagacgcctcagtcaagaagctgaccgtaaatacgttgtttgagcgatacatggcaacaaagaatatcaaggaaagaacgaaaaagaattatatccgtatgtgggactatcggatacgaaatactttgggaaacattcgtgttgtggattttaagacatctcacgtaaggacgttcttttccgcattgtcagatgaaggactggcacacagtactatcaaaggtctttatggcttattgaatccaagttttgaactggcagtggaagatgggattatccgtaagaatccggtaacaggaacacttggagattacggggctccggcaaaggagaaagaagcactgacactggaacagcaggaaaaacttctgaagtttgttgaacagagtaatgtgtataagcctcatcttccaatgatgcaggttatgtttgggacttgcctgagagtgagtgaaaccatcggcttaacctggtcggatgtggatatgaagaaccgagagatccatgtaggtggacagcttgtgtattatgaaggtgatgaagggtattgtttccatgattcagaaaccaaaacggatgcaggaatcagagacattcctatgacacagatggtatatgatgcgttccgtgaacagagagagctgaacctgatgcttggtttacagagtaatgtggaaattggtggacgcagtggattcatcttcaatacaaagcatggacgtccgatcatgccggcgggagtgaacagctttctgaaaaatattgttaatgcctataataagaaagaaagcaaactggcagaagaagagaagcgagagccggagctgatgccgcctatttcatcgcatacccttcgtcatacgggatgtaccaaactgggtgagaacaatgtcaatcccaaagttatgcagtatgtgatggggtgctggatgtccggtggacatccgtttagcaccgaccgcagcggagcgaagaacattcagatgcacaaatcacaatgaatgtctacaatcatattgcagagaagtctcacgtggagaatgagatgtctaaaatgaacctgccagaaactgtacctgctgtggtataaaccataagtcgttgtcgtaaaatgtggtaagaaaatcagacgaatatatttttccaaagatttgtcgtaaaaatgtggtcaaatcaagaaactagagtgcgaaagcaagtgaaaaatccctgtgaagcccgtaaaatcaagggcacaaattttttacaaaataattagcactcacctcttgacagtgctaacaaatagtgttatagttctcctagaacaagaaaaaagcacagcatttccagtatgcgaatattggaaatgcttttcatagaataggaggaaagcctatgaatatcagtaaatttacacagaaatccgtacaggctgtccaggatcttgaaaagattgcttatgaatatggcaatcaggagatcgaagaggaacaccttctgtatgccttgctgacacaggaggacagcctgatcctcaagctgatcgagaagatggaaatccagaaggaatattttattgacacagttaagaaggcactggatgccagagttaaggtttctggtggagagcttcgatttggtcagtatctgaacaaggcactggtcagtgcagaggacgaagcgaaggctatgggagatgagtatgtatcggttgagcatctgtttctttccatgctgaagaatccaagcccgagcatgaagaagctattcaatgaattcggaatcaccagagagcgttttcttcaggcattatctacagtcaggggaaaccagagagttgtcagtgacaacccggaggcaacctatgataccctgaataaatacggtgaggatcttgttgagaaggcgaagaaccagaagcttgatccggtgatcggtcgtgatatggagatccggaatattatccgtatcctttcccgtaagaccaagaacaacccggttctcatcggtgagcctggcgttggtaaaacagcagccatcgagggactggcacagcgtattgtggcaggagatgtaccggaaggtcttaagaataagaagatttttgccctggatatgggtgcgctggttgcaggtgccaagtatcgtggtgagtttgaggaacgtctgaaagcggtacttgaggaagtgaagaagagcgaaggacagatcattctgtttatcgatgagcttcatctgatcgtgggtgcaggtaagacagacggcgccatggacgcaggaaacatgctgaagcctatgcttgccagaggtgagctgcactgtatcggtgcaacaactctggatgagtaccgccagtatattgaaaaggatgctgcacttgcccgtcgtttccagccggttatggtaaatgagccgacagtggaagataccatttccattctccgtggtctgaaggaaagatatgaggtattccacggtgttaagatcacagacagtgcattggttgcagctgccacactttcacacagatacattacagaccgttttctcccggataaggcaatcgaccttgttgatgaggcctgtgcgctgatcaagacggagctggattccatgccgacagagctggatgagcagagacgtaagatcatgcagctggagattgaggagtctgccctgaaaaaagaaactgacaacttaagtaaagagcgtctggctgatctgcagaaagaacttgcagagctgagagatacttttaatacccagaaagctcagtgggataatgagaagcattccgtagagaagcttcagaaattacgtgagcagatcgaggatatcaataaacagatccagaaagcaaaacagaattacgatctggagaaagcagcagagctgcagtacggcgagctgccgaagcttcagcagcagctggaggttgaggagaagcaggttaaggagagtgacagaagcctggtacatgaggctgtcacagatgatgagattgctcgtatcatttccagatggaccggtattccggtaaccaagctgacagaaggtgagagaaccaaactgctgggccttgaggatgagctgcacaaacgtgtagtaggacaggatgagggtgttcgtcttgtaacagatgcgatccttcgttccaaagccggaatcaaggatcccacaaagccgatcggttccttcctgttcctcggaccaaccggtgttggtaaaacagagcttgccaagactctggctgccacactgtttgacgatgaacagaatatggtccgtatcgatatgagtgagtacatggagaaatattccgtgtcccgtctgatcggagcgcctccaggatatgtcggatatgaggaaggcggacagctgacagaggccgttcgaagaaaaccgtacagtgttgttctttttgatgagatcgagaaggctcacccggatgtattcaatgtacttctgcaggtactggacgatggacgtatcacggattcacagggacgtacggttgattttaagaatacgatcctgatcatgacttccaacattggttctccgtaccttcttgacggtatcgacgagaagggagatatcaaaccggaggcacaggaacaggttatgaatgatcttcgtggtcacttccgtccggagttcctgaaccgtctggatgagattatcatgttcaagccgctgaccaaggataatgtaggtaagatcgtagatcttatggtcaaagagctcagcgaccgtctggctgaccaggagctttctctggagcttacagatgctgccaaacagatggtagtggataacggttatgatccggtttacggcgcacgtcctctgaagcgttatctccagaattatgtggagacactgacagccaagaagatcctttccggtgatgtgcatgccggagatactattgtgctggatgtgaaagaaggagagtttactgtcagcacgaaatgacagaacaacatatggttaaaaagtaactccttgaagcagtaaaatatagattgataaacaaaagaactgcccgttctgaagaggattcatcctgatgtgaaaatcagatgaagaatcagaaaatcagaaccgggcagtcttttttttcgggaaagaaaactgagaggtctgtacagggcggaacacagggaacccgggaattgcctcttgacaaaaatggagattggtaagatagtaaaactgatcaatcagaaaatctgagaaataaaaagtaaaggatggaaaagacaatgataccaaaggacccggtaatgcttttaagttacgtaaatacacagctgagggatttttataaaactctggatgcgttttgcgaggacagagacgttgatcaaaaagaactggagaagaatctggagactatcgattatacttacgatccgtctgtcaatcagtttgtataagggagaatagcgttatgaaactaaggaaaagcacccgttctgtaagaaaaatcacttacagaacgggtgttttgtactattttacagttatttttacagtggccttctttttgccggagagaacggtaatcgtcgcggtacctttctttctggcggtaatgactcctttggaatttacagatgctacttttgagttggaagatctgtaagttattctttcaacggtggtcagaggcgaacgtgatattttcagtttgtatgtctttttcagtttcagagaaatgcgggaaggagaaaccgtaagtttctgggttgccactgcatttttctgtactttgaccttaaccgtagctttctttccgctggcaagcgttactgtgatcctggtgctgccgatgcggattcctttgatcttaccccgggaatcaacggatgcgatctttgtgttggaactgcggtaggattttaccttgtcaccttttgcaaggcctgttactttgaaagcggttgtggtctggccctttttcaggatcacagaagtcatgcttaatttaagcgttggcttcagacgggcaatggatgcagtggcctttttcttacagtaggagcaggtgcgctgtttcttaccggtcttcagcacagtcgcggctgtggtgactttccaggaactccatttatgtgatttctccagaatccggaaagtaacgctgagttttccggtataagagccaagaccggtgatggtaacagtggctgtaccgggcagggtgttattggaataggataaagtgtaatcctgattctgagtaaggagcgtgtcaccattttttacagttacctgtggacgctgctcctggccattacaatcaacatcgggaacagttaccgtcagtgtatctacggaaacttccggcgaagtaacggttacggcacaggtggctgtaagtgcaccatcaaaggttgttgcagtaataacagcagtaccggcggaaagtgcttttacagtaccatgatcatctactgtggctacagattctttgtcggagctccagagaacatctttggtggaggcattggcaggcttgatagaaggtgtcagtttaaagctttctccggtgagaagcgctttctgggtctgatccagctggatactttccacggaaactggctgtggagctgtttttctggtatcggaagcagcctgggatttttcaccggattcatttatcggagagtaaacaccggtatccatgtcctgcccctccgggatataggcattgtatttttttcccgcagtgagaggaatgtcgttataggtgatctttcgggagagcgtatctccgttgtattcctcaatctcataggtcatggtcccgttatcattgcctacgagcttcagatagtaatcatctccgcagaaggaaatgaatttctcatcgttttccacagacatgataatatcgttataggaagtgtcgacaacgttattgatgatagaaccgcaaaggttatggctgctgtcatatacatacacatctaccgggcacttaatggaagtgtttgtttttcgcctgttctgggcagcggcagtctgggatggctttgtaagcatggtgtacacaaggtttgagaaagagccatatctggaattgcggataaggtcctgcacagtttttgtgaaaagaaggtctgccacttcattggcatagttgccccaggcttcgttgtatacatttttgacggaggcttctgccagctgtttcacctgctccgcaaaagctttcgtgtctgcaccggccagcccgatgattccggaacagttatcctggctgatgctgtaattcagggtgcccagagagctgaagtttacatcagaaaatccgtaagcactgacagaataggtaaagttgatggtgcggtctcctttttttgtgctggcagagatagcaaagtgacctttcagagtttttcctacgataaaactctgtttcgtaatgcccattttttcaaaaagcttttccagaacctgctgacagcttttattcttctgatcgccggtataggagaaggaggtggaattgatcgctacagccatataacaggataagaagtcataaaattcttccatctgtggcttggtaaagtagtcattcagtttcgggtcaatggtaagaatactgttgtttttgcccagaatctgttgtgcggaagcaagcttctgaccacgttcagtctgtgactttttcttttctgtctgctggcgctgatagtcatggtttgccagatagatatgttttccgccggagagaacataagaatcagaatttccatagcgggccaggaatgaaactgaaaaatcagagtttgctttttcagcgatatagtcagacgaaatgccaaatacagcagtggcaatggttttggagtcggttacttttacctttacaggggttgaaaattccatttttgaaaaagccagagcttcccgaaaatgagcatttaacggcgcggaagcaaggatttctattccggtgacagaaatcgtgtagcctggcagtaactgacggatctcatcataagagtaactggaattttgggaaaccttacatttcagtaccatattctgagaaagtgaggttttctgatactggccgttttcatatataaaggtattggaattattgacatctgtaatggcctgcatctgaagctctataatatcctcagctgcctccatgtgtgtaacacggctgttgtcgtaattaaagaccacgatcttgtcggagctgttctgcaggatgctcatggcactggtgagactgaaattatcagatacaggataatctcttccttcaatgttgatagttccgtcttcggcatttacagcatccagccgtccggcaataatacgtttaccttcctggatcacttcctgaaatggaatattgttggtttttgcataagcatgggctgcggatccggcagtgcttttgatcacaagctttttccatccctggaaagctgtatctgcaatagaggttacagattccgggatgtaggtttctcccagaactttacagttgtagaaggcgtagccgccgatggaggttacggtgtctgggatggttacggtggtaagatgtgttgtttcggatggagtgagccatgccagtttagcagggatggtttctatgccggattcgaaaataagttcggtcagattttcagcaccaccgagagggccataactgccaccggtataataactgtcataggattcgcaggaagtcagactggcaggaatagttaaactggtaatagcagtaccggaaataaagccgtatcccagagtattcagtttggaaggaagtttgatggattccagagcagtacatttggaaaaagccaagtaatcaatatcagtaatgttatcgctgagcactacatcaacgagagaagaacaaccgtagaaagcagatgatcttaagtattttatattttttgagaaagaaatatctttcagagcagtacaattgctgaaagcagatgactgtatatcaacgtaaaatcctccctttggattatcggtaaaggaaacagaagaaatagaagtgcagttgtaaaaagcggacgctcccacagtttttaccgtttttggaacaacaatattttccagggaactgcatccgctaaatgaactgcgcccgatggtctggagattctgcgaccattggacagaagcaagcttctggcagtcagaaaaagcagaatcagaaatggatgtgacagaatcggggatagaaatagcggttaatttcttacagttggaaaaagcatagttgccaatggacgtaacggtatccggaattgttatggaggtcaggtgtgttgtttcggatggagtgagccatgccagtttagcagggatggtttctatgccggattcgaaaataagttcggtcagattttcagcaccaccgagagggccataactgccaccggtataataactgtcataggattcgcaggaagtcagactggcaggaatagtcaaactggtaatagcagtaccggaaataaaaccatagcccagggttttcaagtgagctggcagtgtaagagattttagagcagcacaaccgtaaaaagcctgacgatcaattttagaaatgctatctgcaagtataactttttctatagaaagattgtcataaaacgcgttataactgacttcagtaacagtgtattttccaattttttcaggaacagttacatttgcggctgttccgttgtacttggtaattgttgcagtaagaccggaagtggtgtactgaaaatcaccgaaagtgttggcatcggcaccggcagagggaacacttccatcgtcaaattccggttcctgtgcagaattttcgtcagcagatttttcctgcgttaaggcttcggtatcttctgcatcgtcagaaaagtcctcagtaagctcctggacagagccttcttctgaaagatcagaatcggcagaatctagatcagaatcggcagaatcaacattagaatcggcagaatcaacatcggaaatggtttcggaagtatcggatgcagagaaatccgatacagcagagctgtattcgtcagtggatgaagcgtcatcggatacagcggtatctgagagatcgctataagaagatatggaaacttcttcagaagtctgagcaacattgcctgactccgcatcttcagccaggacggcagaagcaggctgcaggcacatgagtactgcaagggtgcaggccagtaatttctttttcataagggtgatcctcctttgtggatatatttttttgattcagggcagctgcgcaatatactgctccagaagattcaaggtttcttcctggctgtagaccaggtgacttccgggaagggttctgataaattcagtgaatatcctgcacagagaaggctcctggatgtggatattgcagcagtaggcgccaaaaacaaaggcattagtggtataaatatgcagttccgcaggtgatacatataaagaaagatagtcgggaagctgcaggtatgtgggacgcacaataaaaccggagatatttccgtcggagatctcttcatgaagcgaaaggagcatctgacggatatcctcaggatcaagaggcggaacatactgcggtggcagatcctggagaacacagctggtgacaagatcagccagacctttttctgtaaaaatagtgaggtaattctgggaaatctgacggagtacggaaaaatgctgttctaccaggctgtacatggcaggataaggcatatcatcgctgttgagatatttctgaatgatctcgggagttatgtaacggccgggacatggctgattcataaaaatttgaagggaatcaggggatgttccgtcgatatattcccggagaacatgcaggatatcgttgctgcaccgggtaagcagatcacatttgggcagctgcttctgaaaaaaatcccggtagtagccgatcagctcatggtcaccgctgatccgggctgtgctcagatccccggaaagcaggattaagcaggagggagcaacgatgtagtagctcagcggagagagcgcagaggcaaaaaacggttccgtgaagtaataaggcttatagttgccgcgggaagcaagacacatgggaatcacggactccattttttttaaatttctgcggaccggatccggagagctgatgctgtctgcatgataaatacaaagaatctcatcaacggaaaacggatactggttcagccacagttccataaattccatggtcagatcaagcttttcaggaagatacatctggattttaggatctctgtgatgggagacttcatagatcagggcagaacggataagactatggactgcatattcgccgctgatcagggaatccgtgagaggaagtgtattcacctttggagggggaaacatggaaaaatcaacggctgctagagtatttataagagtacagactgcctgacggttttcgtaagcctcttcgccctgaagaaggatatcatgaagacggaaaaattcctgacgttcttccagggtcagtccgaaatatcgtgcaagagactgaagagccttgtagggaagaacacgttcgtctttcagggctttgtgaatggaagttctttcgatgccggtgtttctggcaatagtggtgatggattcctccctctgttcgatcagagctcggagataattactgaattttgacataagtgtttctcctgttcaatgatagcagcctgggctgccataagtaattacctaaattatacaggacaaaatgggaaaattcaatttgtgacagcgggtgtgacagagaagaagcaaatttgtgcacaaaatcagtccattaaaaggggggagaatgaaaaattagtccgacaaaataaaaaagcggataaaaacagagaaaaaccgattgcaaatcttaaaaaagtgtaaaattcacaaaaaccagttgcattttttgtgcagatgtatattatatatagttagccgactaattaaaaaagaagatcactgcttcgtatatcattaacaaagagcaggtgtctgatcggatgagagaggagtgacagcgtgttttgtaaggaggaagatgagaaagaaaggcagagcagttttttatctctgtttatgaaggtagaccgtcattttatgacgaaatgctttggtcagatgcaggagctggggatttatccgggacagatcccggttctggggcttgtgtccggaagggatggcctgagtcagcgggaaattgcaaagatcctgcatatcaagccgcctacggtaaatgtatcgatacagagactggagaaagcaggctttctttataagaaaccggatgaaaaggaccagcgtgtgaccaggatctacatgacagaaaagggaaaggaaatcaaggcaaaagcactggaacggatccataaaaatgaggctgtgatgatggaaggcttcagtgaggcggaacagtgcctgcttcggagatttctggagcagatccttgtaaatatcgaaaagatccagccggaggaagccatagaaaagcttcatccggatgaaatgacagaaaggaaggaacagaaacgtgattaaactgatgaaatatctgaaacgatctgcaggttacatcgtactcatcattgcgcttctttttcttcaggcatactgtgatctgtctctgccgaattacacatcaaatatcatcaatgtgggaattcagcagaacggtattgaagacagtgttcctgagaagatcagaaagacgtccatggacagtctgaagctgtttatggaggaggatgatgcgaaaactgtggatggattttatgaggaagagggagatgatctggtattaaaggataaaatctccaaagaagacagagaagaactcaacgatatcttcggcaaaccgatggtgatcgtttctactctgacgtccgacagtgaggaatcaaaggcagctcttgcaaagatgggaatcccggaagggactgatccactggcggctctttctcagatgccggcagaggctctggctgctatgaaggagcaggtcggagaaaagatcgacaagatgcaggaatccatcatcacacaggcaggcgtttcctacgttcgtgcagaatatgaagccatgggtgaagatgtggatgccatacagatggattacatgaaagcaacaggtatccgcatggtgctgatggcactggtcaccatgatggctgcagtatgtgtggtatttctttcatccagagttgctgcatctatgggacatgatctccgtgggctggtttataacaaagtcataggtttttccagcagagagtaccataagttttcaacagcatccctgattacacgatgcacgaacgatatccagcagatccagcaggtaatggctatgatgttccgtatcgtgctttacgcgccgatccttggaatcggtggtgtgatccgcgtgcttcagagagattcctccatgacatggatccttggggtggccattgtactgatcatggcatttatggcaatgctgttcaggatcgcaatgccgaaatttacagccctgcagaccatggtagataagctgaacctggtaacaagagaaatccttaccggtattccggttatccgtgcattcagccgggagaaacacgaggaggagcgttttgaggatgcaaatatcactctgacgaagacaaacctctttgtaaaccgttgtatgacatttatgatgccggtgatgatgctgatcatgaacgcagtttccgtactgaccatctacagcggttcttatgcggtagacagcggaagcatgcaggttggtgatgttatggcatttatccagtatgcaatgcagatcatcatgtcatttttgatgatcacagcaatgtctatcatgctgccgagagcaaatgtatctgcacgccgtatcaacgaggtgcttgagacagaagtcagtgtccaggatccggaggatccggtacagccttcccaggatgtgaagggtactgtagaatttgaccatgtaagcttcgcatatccggaggcaggagagaatgttatcacagacatttctttcaaggcagaaaaaggtgagacagtagcgatcatcggaagtacaggaagcggtaagagtacactgatcaatctgatcccgcgtttctatgatgcaacagaaggatctgtgaaagtggatggcgtggatgtccggaaaatgacacagaaggatgtccgtgacaggatcggttacgttccgcagaagggtatacttttctcaggaaccattgattccaatatccgttacggaaagacagagattccggaggatgcagtgaaaaaagcagcagaggttgcacaggctacggagtttatcgacaccaagccggagcgatataagactccgatcgcacagggaggaagcaatgtttccggtggacagaaacagaggctttccatcgccagagctatcgcaaaggatccggagatctttatctttgacgacagcttttccgcactggatttcaaaacagacagtacacttcgaaaagctctgaaagaacatacaaaagaagcaacaaccattatcgtggcacagcgtatcagtacgatcttaaatgcagataagatccttgtactggacgatggacatatggcagggatcggaagccataaggagctgatgaaatcctgcgaggtatatcgccagattgccatgagtcagttatcagaggaggaattggcatgagtcagcagagaagaagaggcccgatgggcggacacggaatgcagccaacagagaaggccaaggacttcaaaggctccatgaaaaagctctttggctatatgggcagatataaattccgttttatcctgatgtttatctttgcagtggcaggtacagcgtttaatattgcaggcccgaagatccttggaaaagctaccacagagctgttcaatggtctggttgccaaggtaaacggtacaggcggtattgatttcagtaagattggaatgatccttctgtggactttgggactgtatgtggcaagtgcatgcttttccctgatccagggatttgtcatgacggggatctccaatgatgttacatacaatctccgaaaggatatttcaaagaagatcaaccgtctgccaatgaattatttcgagagcagaacaaacggtgagatcctttccagggtgacaaatgatgtggataccctgcagatgagcatcaaccagagcatgacacagctgatcacatccgtaacaacactgatcggtgtatttatcatgatgctttccatcaacgtgtggatgacactggcagcagtgctgatcctgccggtttccatgcttatcattaataaagtaatgaaacactcccagaaatatttccaggcacagcaggagtacctgggaaaagtaaatggtcaggttgaggaaaatttcggcggccatgatgtggtaagagtattcaacaaagagcaggatgcgctgaaggaatttgagcatgacaaccagaagctttatgagtctgcatggaagtcacagttcttttccgggatgatgatgccgatcatgcagtttgtgggaaatctgggatatgtgatggtggcacttctcggagggctttttgccatcaaaggaactatcgaggttggagatatccagtccttcttccagtatattcgtaactttacacagccgatccagcagatcgcccaggttacaaaccttctgcagtcctcggcggcagcttctgagcgggtatttgaatttcttgaggagccggaggaagaacttcagccggagaacccggattccattgagggactggaaggaaatgtacagtttgagcatgtgaaattcggttataatccggataagatcattgtaaatgatttttccgcagatgtgcatgacggtcagaagatcgccattgtaggacctacaggtgcaggaaaaacgacgatcgtaaagctgctgatgcgtttttatgatgtaaatggcggaagcatcaaggttgacggacatgatatccggaacttcaaccgcagcaatctccgtgagatgttcggaatggtgctgcaggacacctggctgttttctggaactattatggaaaatatccgctacggaagactggacgcaacggatgaagaggtgatcgcagcagcaaaagcggcccatatccataactttatcatgcagcagcccggcggctatcagatggtcctggatgaggaaaccagtaatgtttctcaggggcagaagcagctgcttaccattgcaagagcaattctggcagacaataagatcctgatcctggatgaggccacatcttccgttgatacaagaacagaaatgcagatccagaaggctatggataacctgatgaagggcagaaccagctttgttatcgcccacagactttctaccattaaggatgcagatctgattcttgtcatgaaggacggagatatcattgagcagggaaatcatgaagagctcctggcacggaagggcttctatgcggatctgtataacagtcagttcgagaaaaaagaggctcaggcgtgagactgagatcaatcgttattatttaaaaggtgcgaagcggatttcgaatgtccgcttcgcttttttactctatacatctgttccgctttcgggtataattctgtaataaacactccggagcatgttttcggaaataatcctggagtgtccatgaaaaatgacagaaacgggaggattttaccatgatcataacgacaacaccatcggtagagggaagagcaatccgtgaatataaaggaatcgtatttggagaggtgatctcaggagtaaattttatgaaagatcttggcgcgggtcttcggaatttctttggcggcagaagtgcctgttatgaggaagaacttcagaaggccagggaagaggcactgaaagaactggaacagcgggcaggagcaatgggcgccaatgcagtgattggcgtggacattgattatgaggtacttggcgcagataatggcatgctgatggttacagcaagcggaacagcggtagtggtggattaaggcgtatggcagcagtaaaaaacggacgggaatatcttgcacatgtaacaggaactctgcggcaccggatcacacagctggatgattccatagaggctggtcagaaagaaatcgaaggaatgcacgagtattactgggaaaactacacagagatggaccagtatggctacgaaaatttcgataaccagcaggcacttctccatgagatcaatgccagcaatgaaaagatcgagctgcgccgcagattccgtaagatgatggattcaccattttttggcagagtggatttctgctatgaaggtgatgatgagccggagatcttttatataggtatcgcaaaccttgcggaggaaaacggtggtctgcctctgatctatgactggagggcaccggtgtccggattgttctatgattttgacaaaggaccggcctcctatcaggccccgctgggtgagatccatggagatattgcggcaaagtggcagtataagatccgtggcggaaaaatgatctacgagttcgagagcgatgtgaaaattgatgatgagatcctgaaggcagagcttggaagcaacggagatgtacagctgaaaaacattatccgaaccattcagaaggagcagaatgccattatccgaaacacctcggacaggatcatggtgatccagggggctgcaggaagcggaaagacttccattgccctgcacaggatcgcatatctcctttatcatgacagaaagaatctgaaatcctcttctgtgctggtactttcgcccaacggagtattttcggattatatttcccatatcctgccggagcttggtgaggagaacatccgggagatgagctttgatctttttgcctataagagactgaaaaatacagtgtctgactgcgaggatcgttatgatctgatcgagcggcagatctcaggcttatgtgatgaggagcttctgaaggaaaaacagtcccgggattttctggaccgtatggaagggtatctggcagaactggaagacagtcttatgaatttccgggatatagaacatcgtggcgtagtaaaaaaagaacaggaaattattgaactgttttattttaaatttatggatatcccgctactttccagaatggatgcagtggcagagtatttcattgatgaggtggaaacgctgaagggttttgaccttccggaggaagaaagggatgctgtgaagagtcgtttttaccggatgtatgagacaagagatctttatgtgttatacaatcgtttcctgaggcaggagggatttccggcgcttccacaggtacagtacgaaaaaagaaagcttcgttatgaggatgtgtatccggttctgtatctgaaataccgtctggagacccagcaggaagacagcggtgtccgccatctgatcgtggatgagatgcaggattattccatgatccagtatctcatcatccagaggctttttaaatgcaaaatgacgatcctgggagatagggagcagaccatggatggggaccaacaggatgtgcttacattccttccgaagatctttggcaaggatatcagaaggatcgtgatgaataagagctaccgtaataccattgagattgcttcctatgcgaataagcttgcggggatcacagaggtggagctttttgaacgccatggaaaaccggtggaagagaaagaatttacggggcttaccgaggcactggagcgtgtggtaaaggaactgagactggagaagcagacagtggcggaagccgacgaagacatgccggaaaatgcggcttcggagacagatgggactgagaccggggaggagctttcttacgagacagcagcggtgatcaccagaactgcagatgaagcgagagaggcatattatattcttcagaaaaaactggaagcagagggctttgacacaaaggaaaggctgtcactgcttcacagggacagcacaaatttcaaaaaaggtcttactgttaccacgttttatatggcaaagggactggaatttgatcaggtattttctgtatttccggggactgacagaagtccgatcgtgcagagagccagatatattgcggcaaccagggcgctgcatgaattgtatatgtatgaaataacagaataaataacattacaaaacgctgtaaatggaaatgtgagctgtctcttcatcttaccggctataccggcaaaatggagaaacagcagtgataaatttccttttacagcgtttttttgtctatttcatattttcgcagaagatttcttccatggatccggtaagaggaacgccaagcttctgcagggttccgtcaagagcatggaaaacttcacgtacattgtagaaagctgcattatttcccatgtgaccgatgcggataacctttccggcaaggacatcgaaggagcctgccagcatgatgttatagtcttttctgactccgtccaggatcgcagcggcagtggtgccttccgggacttcaaaaacagttaccgtgttggaatagccgctgtggagatacagcttaagtccggctcctgtaatggcctttcgggaggctgcggcgattttggcgtggcgtgtaaggatcccgggatcatcggcaatgttgtcaatagcagcccgcagaccatagatatcgctgatcggcatggtatatggaaaccatttttcttcataataatgtgcgaaggttgtgagatttgcgtagaaagaagcaatgggtgtctttctttcagtcattgccttctttgcatcgctgctgactacaacaaaggtaagtcccggaggtgcagataccaccttctgtgatccgccgcacatgatatcgatctggcatgcatcaatgttcagaggctcgccgaaggaagcggagacagaatctacaacggtaaggatcccgtattttttaagaagcgggcagatggcagatacatcgttgagcatgccgcttggagtatcgccgtgtactacggttgcatatttgtagttatggttatccgcaaggaaggcttccagttcctttacatcgagagtgttctgataatctctggtataaagctccggtctgcctccgtacatggaaacaaaatcggcaaagccttttccgtagataccattgtccagaacaagaaccttatctccgggctcagtcatggaagcaatggcagcctccagtccaaggataccctcaccgcttaagatgagggtttcgttggaggtatggagaagagtgctgatcttctcgcaggtttctttataaaattcgacaaaatcttcgtccagatccggatttgtgcattccatgcttcttgccagacggacattttctgcgacctgtgtaggtcccggtgtcatgatcttatacataagctcacctcttgatctttatattatttccgcaaattacggcagctgttacagctatttttttaatccggtttttcttgctgcaaggtttaatggtgtgatcactacgagaacgatgacagctgcaacaccgatctggaccaggtttcccgggatggaagataccggtgccagtggatttccgtagatgataacctctgcaatgtagtatcctgcaaccttgatcacgcaggctgcggcaatggcgatcacataccatttcatgttctggtgccggggattctctgtgagcttacctactgtgaagcccatgatccctacaataataagagtaaatggtgcccacagggtccagccggagagaaggtcaaagagccccattccgatcccaccggcaatggctccggttttctttccgaataaaatggcaccgatgaataacggtacatttccaaggtggatcagtccgccgttggctgcgatcggaagcttaacattaataaatgcggtgaagatataagtcagtgcaacaaatgcggctgtaatggtgagaaactgaacagatgaaagctcctggtcagttctctgagatgtctgaactgctttttccatagtgatagatcctttcccgaaaacatcgatgtatggatgtcctcttttcatatatttttggttgggtatactttacaacatgagtgtacatgaataaagacacaattatagaaaaaaaagaggggacagattcagggagatatttgtcattaaaacaggaggcttacttggtggggaataaatcagaactttcgtaatgaaggcgtaaaacgggaaatacaggatcagcataagaagagaataagataggtatatctgggaaaattataatgttagaaaaatcctgtacggagcaggatatctgcttacaggatattcataaagtacagggagaaatcaattgacaaagctgtaataaaatcgtaaactatagcaaagagtgtgttcaggagtgaatattccggacacactttgtgactgatgatgattatgaggaggatactatgaagaataaaaaatttattgcacttttagctatgactgttgctctttctggtgtcatgacggcatgtagtttcggaggaggaaaagaggacagcgtggttgtggagtctactcctactccgacaccggcgaaaaaagcgaaggttacaccgactgttgcagcagacgcacagaatacaacctatacatccaaggataaatccgtagcgatcaagcttccagatgcaacctgggccaacaagtccgatgagacagatatggtaagcttcgagtctccggaccagggcaggatcctgatccttcacggctccggtgcagatctggaatctgcagtgatcccgaactcccaggatatggcagtttccatgacacaggcagagaacatggtaaatggaaccgattttgagatccaggattacaaggcagatcagaaagacggaatcaacatttattcctatactgtgaaatataaggatacgaccaagagtgacggttatgtatatgctatcaataaatactttgtaaatgacagtgagtattacagccttgtggcatctgttaaaaaagaggatgctctgaaaaaggttcaggagtctgtcgacagctttgcgatccttggtgattccactctgaagagtgcggcaaatggttccgcagccaagactgccggtaaaggtaatgcagcagcttcctctgacggaagtgcatctgcagatggtaatgcagcagcttcttctgacggagcagcagatggaactacagctgccgacggaagcacatctacagacggaagtgcagcatctgacggaacatctacagacggaagcagtacatctgatggttcttccaatggaactgcatccactgacagcagctcctccggtgctatcgtaaatggcggatttacagatgagcagcttggcaacacagatgagacaagaactatttacagaaactccgatggtaaaccacgtgttatcgttccggacggaaacggtgcatggatggataacgaaggaaaccgtttcaccttctcttctcagtatgactgtgatgtatatgaagaggatggaacaagcttctactggcacggtgaggctgcagacgtatactatatgcctgtacagtaaagcctggagcagcaggagattcggttagataagaattccgggatcacagcttttgtggctgcggtcccggattttttgtgtcatattatgtcagaggcgtatacttatacaggaagacatggtataatgtgaacgctgcgggcgatggaacgcccggaaaatatttggaggtttttatggaagcatacagtgatttcgccagagtttatgacattttcatggacaatgtggaatatgaaaaatgggcggaatatcttataggaagtcttaaagaatacggaattgaagatgggatcgtgctggaacttggctgtgggaccggagtgatgacagagcttctggctgagtccgggtatgatatgatcggtgtggataactctgaggaaatgcttggcgaagccatggaaaaacgtgcagaatccggtcatgagatcctttatctggaacaggatatgcgggagtttgaactttatggaacggtacgtgctgtcgtcagcgtctgtgactgtatgaattacatcacagaggaggatgatctgcttactgtatttaaactggtgaacaattatcttgatccggatggaattttcatatttgatatgaacaccccgtataaataccgggaaatgcttggaaatacgactattgcagagaatcgggaagagggaagctttatctgggaaaatgaatttgatgaggagaccgggatcaatgtgtatgatctgactctgtttcttccgagagaagatggtctttatgagagagacgaggaaattcattaccagaaggcctatgatccggagaaagtaagggaacttcttgaaaaggcaggcctgatcccgctggcggtttatgacgcatacaccaaggatgcaccgaagccggacagcggaagactgacttttgtggccagagaacatggaaaggaaattccgtcagacgagaaataaaggaggaaattttttatatgagtgattatattgtaagagcaacagcggcaaacagccagatccgtgcatttgcggctgttacaaccgatatggtggagacagcgagaaagaatcataacaccagtccggtggcaacagcggcactgggacgtctccttaccggcggtgccatgatgggagctatgatgaaaggggaaaaggatctccttacacttcggatccatgcaggcggaccactgcagggaattacagtaactgcagattctcacggaaatgtaaagggctatgtggggaatccggatgtatgtatcccggcaaacagcaaaggcaagctggatgttgcgggagctgtcggcgtaggctttatggatgtgatcaaggatatgggactgaaagagccatatgtgggacaggttgcccttcagactagcgagatcgcagaagatctcacctattattttgcaaccagcgagcaggttccgtctgcggtaggactgggtgtgctgatgaataaggataatacagtccgtcaggcgggaggctttattgtacagctgatgccttttgcagaggaagaggtgattgcaaagcttgaggaaaacgtatcaaagatcgattctgttaccaatcttctggagcagggacacacaccggaaagtcttcttgaaaaagtactggaaggctttgacatagagatcaatgatacactgcccacacagttccattgcaactgctgcagagagcgtgtggaaaaagcgctgatcagcatcggaagaaaagaacttaacgagatgatccaggaaggcaaggacattgagatgaactgccatttctgcaataagaattataattttaccgtggaagatcttaagaggatcataagagagtgcaagcgataaaactcgggaggaagaaaaaatgaagcatggttttatcaaggtggcagcggcaacgccgagagttaccgttgcagactgcaaggcaaacggagaggaaattctgaaggccattcatgaaatggaaaaggaacatgtcaagctgatggtatttccggaattttgtatcacaggatatacctgtcacgatctttttctccagagatgtcttctggacagtgcgtgggatgagcttctgcatattgcagaggagacaagggagacggacgccctgatctttgtgggactcccgctgcgtcacagaggcaagctctataatgtggcagcagctctgaatcatggccgtatcgtgggatttgtgccgaagactcatattccgaattataatgagttttatgagcagagacagtttgcaggtgcagaggaagaagatgtggaatttgtggacttcctgaagtgcgagaaaaatgaggaggatgagttctgggatgaaattccttttggaacagagctgatctttgaatgtaaggaatttccggaattcaccgttgcagcggagctttgtgaggatctctgggtccctgcgccgccaagtatccgtcatgccgtcaacggtgcgcatatcatcgttaatctttctgccagtgatgagatggtaggtaaggattcctaccggagaactctgataagcgggcagtcagcacgactgatctgcggatatatttatgccagtgcaggggaaggggagtctacccaggatctcgtgtttggcggacagaatatgatcgcagagaacggttccatgcttgcggaaagcagacgctttgagaacggcatcatttacagtgagatcgatgtgcagagactggctgatgagagaagaagaatgtccacgtatccggcagtttctacctgcagtcatacaagagttgatttttccgtagcagaggagaaaacaagacttaccagaaaatatccacagtatcccttcgttccgtctgtgaaggaagagcgtgatgagcgctgcgaggagatcctgaacatccaggctatgggacttaagaaacgtatggagcatatccacagcaggagtgcggtggtaggactttccggaggactggattctaccctggcgcttcttgtaatggcacgtgcctttgaccggatgggaatgccgagagaacagatccactgtgtgaccatgccatgctttggaaccacagacagaacctatcagaatgcctgcaagttaagccgctgccttggtgcaaggcttaccgaggtaaatattaaagaggcggtaaatatccatttccgggatatcggacatgatccggagatccacgatgtgacgtatgagaacagtcaggcacgtgagcgtactcagatcctgatggatacggcaaacaaggaaggcggcgttcttgtgggaaccggagacctttccgagctggctcttggctgggcaacctataatggcgatcacatgtccatgtatggtgtgaatgcttctgtcccgaagacactggtacgtcatctggtacgttattatgcggatacctgcggagatgaggaactgaaggaggttcttctggatatcctggatactccggtaagcccggagcttcttcctcctaaggatggcaagatcgcccagaagacggaggatctggtaggaccttatgagcttcatgatttttatctgtattacatgctgcgtgcaggatttacaccggataagatctacaggcttgcctgcctgacctttgaggggatttatgataaagagacgatcctgaaatggctgaaaaccttctatcggagattttttgcccagcagttcaagcgttcctgtctgccggatggcccgaaggtaggtagtgtggcactttctccaagaggagatctcagaatgccaagtgatgcaagtgcaaggatctggcaggatgtgctggagaagattgaaatctgaacgtagatcgcaaagcggagagcttaagtgttctccgctttttttactgcatccgtgatagctgaaaggagtacctgggaggtatatttccggtctcctgcatactgaatgtcttccagggactgactggaatagatctgacttgccaaagaatccagaaccggttccataagaggataggaagcttttgtggtttcatttaaattcaccagacggatggccttgatcctgtcagcatttacagtaacttccacatcgaaggtattctcgttcagggtgatggaagaggtatagacgcccggcttgtagcgggatttttcgctggctgtatgactggcattttttccgggaccgaacatgaagaaaagaacgacagccagaacgacagccagagccagaaagacagctgtgtaaatgatctctttcatatgtaggacgatgatcctggttttggaactcatggcgcacgcctcccaaagctttttatatagtttattatcgggagggaggatttatgccacagctgtgcgcaggttattcgatactgtgcctggaaaaataaggaaaagagcaggcagatatttcagaatatagagaacgaccgttctataggagcagaatttgtggtatgataggaatacttcaggcgcaggatggcgccggaatgactgaaaatctgcaagtgatcgggaggatgaagatgtcattacagtttatcataggaagttccggaagcggaaaatcctgttatgcttatcagaatatcatagaacaggcagggctgcatcctgagaagcttttttatgtgatcgtgccggagcagtttaccatgcagacccagaagacactggtggagatgagtccgggcaggggaatcctgaatattgatatcctgagctttgagcgtcttgcataccgtgttctggaggaagttggaggagacagccgcatccttttggaagaaaccggcaagagtatggtgctgcagaagatggtacagcagcatggaaaggagctttcctatctgggaggtcagatgcgtaaagcgggatacctggatgaagtgaagtctatcctttcggagtttatgcagtacgatatccgggacagtgagattcaggagatgatcgaggattccggtgacagagcgttacttcagatgaagctgaaagacgtagctgttctttaccaggcatttaccggatatctgaaggatcattatatgacaggagaagaagtaatggatgcgctggaaaaagctcttccgttttctgaaaaaatgaaaaacagtgtactccttctggatggttacaccggttttacgcctattcagatgcgtgttgtgggagaacttcttgctgtctgtgagaaggtgatggtaacggtgaccatggatgcggatgagaatctgagcatgagaggaaaaccttatcagcttttttatatgagccgtcagatgatccacgggctttcggagctgaccagggagatcgagacaccggttcttttgaaggaggtgggaaaatcccgcttttcccaggcacctgcccttcatttccttgaaaaaaatatcttccgttaccgaaaaaatatatataaaaaagcgcaggatgagatctgcatgttttcggcagtgaacccgcagaaggagatggaagaagctgcccgccggatcgccagacttgtaagggaaaagggctgccgttacggtgagatcgccgtgatcacaggtaacctggaggagtatggaaatcttgcaaagcaggtatttacagcagcagggatcccgtatttcattgatgagaagcacacggtcctgatgaatccgtttgtagaatatttccgggcagcacttgagatggcagtgcaggatttttcctatgagagtgtattccggtatctccggtgcggaatgtcctgtgtgaccagggaggaagcagaccttctggagaattatgtgctggctcttggtatccgtggatttaagaaatgggatgaagtgtgggtgcgtatttaccggggaatgccgccggaaagcattcagaggcttaatgagatccggcagcggttcgcagatgagaccagagagcttgcgctaagctttaaaggtgggaaaaagacggtgcgggaatactgtacttttctctacgagtttgcagtgcggagccaggtgcagcagaaactgaagcatcaggaactgaaattcaaggaacagggcgacaaggccatggaaaaggaatatgcccagatctacggaattgttatggaacttctggataatatggtggagatcctgggagaggaaaccgtgaaccgccaggatttccgtcagcttttggaaacaggactgaaccaggccaaggtggctctgatcccgccaagtatggaccaggtacttgtgggagatatggagagaaccaggctgaaggatatctgtgcactgttttttgtgggagtaaatgaagggaatattccgaagaatacatccggtggaggaatgcttacggagattgacagagaattttttaaagatcaggggatccagcttgcaccggggcccaaggaactgatgaacatgcagcgattttatctgtatctgaacatgaccaagccaagagaactgctctgtctgtccttctgtcagtccgacagccagggaaaagccctgagtccggcctttcttgtcagtaatatccgggagatgtttccggaaatggagatccggcagtgcggagatatgcaggaacctatggaattactggagcttccgggaatcagcctggattatttcctgagagggcttgcaggagaagcttaccaggataatgcggtcttccaggaactgtacagctggtatcttcagagcccggaataccggatccttgtaaaaaaacttacagaggcatctttttcagaacgaccgtcagataagatcggaaaaacagtggcaaagatcctctatggagaaatttccccgtacagtgctacccggctggagcgttttgcggcctgtgcatttgcacattttctgcagtatggcctgaaggttacagaacgtgcagagtatgagttccgagctatggatatgggaaatgtcatgcatatggcactggaaaaatttgcagcggaagtccgaaaagagggactggactgggcagagcttacggaggaagagcgaaatcgtatcatagacagctgtctggatcaggtttccgcagattacggaaatacgatccttaaaagcagtgcgagaaatgaatatatgatcgaacggaccagacgtattttgcggcgtaccgtgtgggctttgcaggaacagctgaagcatggagcattccggccggaaggatttgaggtgaggtttcagggcggaaggatcgaccgtgtggatatcatggaagagccggagaacaaccgggtctatgtgaaggtgatcgattataaaaccggaaatacttcgtttgatctgctggcgttgtatcatggccttcagcttcagctgatggtctatctggatggagcattacaggtggaaaaacggaagtatccggatcgcgagatcgttccggccggtgtgttttattataatgtgaaggatcctatgatacaggagaagatccatgcggatatggaaagcatcaatgagcagatgctgaagaaaatgaaaatgaacgggcttgtacaggcagatgataatatgagtaccaaaattgacagcactatggcctccataccggtatccctgaaccgggacggaagcttcagcaaaagatcttctgttgcctccaggaagcagtttgatgctctgggagcgtatgtgcggagaaagatctgtgacatccgggaatcgatcctggatggaaatgcggcagtggaaccctatgaacttggaaaaaagaatgcctgcacatattgtccgtatcttactgtgtgcggcttcgacaggaagataccgggatatgagtttcacaggctgtcgtccatagaagaagatgcactgtggaaaaagatcatgaagggagaggaagagaatggcagtgaaatggactgaggagcagaaaaaggtcatcacgctccgggaacggaatattctggtcagcgcagcagccggttccggtaaaactgcagtgctggtgcagcggatcttaagtaagatcatggatcctttgaaaccggtggacattgaccgtcttctgatcatgacatttacaagggcggcagcgggagagatgcgggaacgtatcgaacgtggactggatcaggcactggctgaagatccggataatgagcatctgcagagacagatgacgttgatccatacggcacagatcactaccattgacggcttttgcgcctatgtgatccgaaattattttcatctgatcggactggatccgggttaccggactgcagatgagggtgaactgaagcttttgcaggaagatgtgctgaaggagctttttgaagatcattatgcagaaagagaggcagattttactgcatttgtggaatgctatgcgccaggaaaaacggatgaaggactgaaggaacatgtgctggagctttataatgctgcgatgagtaatccatggcccgaaaaatggctggacagctgtgtggagaattatcatctggatccggaaaaaggtcttgagggaacgcgatggttccgatatctgtgggaggctgcagattgtgcactgaaagaagcggaagagcttacagaaaccgcaatgaagacctgtcagctccaggatggaccggagctttatctggaggctctggaaaaagatatgatactgatccggcagttaaaacaactgtccgttaaaagggattatgatgagatagcgcagaatctccggaatctgaagtttgcaagactttcctcaaaaaaaatggagggagtatcggagcagctgaaaaatctggtaaaagctcttcgcgaagatgcaaaagataatctgaaggaactggggatccgatatttttacggaaatctggttgagctgacggaactgacagaagcatctgcaccaccgctggagatgctggtaaagctgacaaaggattttgcagaacgtttccaggcaaagaagcgtgaaaaaaatgttctggatttttcagatatggaacattttgccctggacatccttctgaaaaaggaaggagaaacctatgtgcccagccaggcggcaagagagctttctgaaaaatatgatgaggtcctgctggatgagtatcaggacagtaatctggttcaggagatcctgatgcagacagtttccggctgggtcaatgaacgcaaaaatatctttatggtaggagatgtaaagcagagcatctaccgttttcgtctggcccgtccggaactgttcatggaaaaatataagagctattcactggaagacagtccggaacagcggatcgacctgcacaaaaatttccgaagcagaccggaagtccttgaaagtgtcaactttattttccggcagatcatgggggaagatttgggaggaattgcttacgacgcggcggcagctctgtatcccggagcttcttttccggaaggccaggatccggaatttgtaaaaacagagatccttcttgtggataaatacagtccgctgctggaagaggaggatgaagaagtaacggagaatgagagagagctggaggcccttgccattgcaggaagaatccgatctatggtagggcatgaacgggtgctggataaggaaacgggagagtatcgacctcttcaatatggagatatcgtgatcctgctccgatctgcttcaggctgggctgaaaccttcggggaggttttgagtgcaagagggataccggtatatacggcctccagaaccggatatttttctgcaacagaggttgtgacactgctgaattatctccggatcctggataatccgctgcaggatattcccatgaccggcgtactgcgttcaccgatcgttggatgtaccacagaagagctggctgagcttcggatcgcatatccggaaggaatgatctatgaatgtgtgtgcaggtttgtggaggactacagaaagcatgggagttttgaggaaaacaaaaaaatcctcggagagaagctgtcctgttttatggacaccatgaatacacttcgtgataaggcggcttatacgccggtccatcagctgatcctggaggtacttgcacgtaccggatatggagaccatgcaaaggcaatgccaaatggtgaacagaggaatgcaaacctgaacatgcttgtggaaaaggcaatggaatatgagaagacaagctatcgaggcctttttaattttgtaagatatatccagaagcttcagcagtatcaggtggattacggggaggtaaatctttccggaaccggggaaagtgcagtacagatcatgacgatccataagagcaagggactggagtttccggtagtgtttgcagcaggaatgggaaaacgctttaatttccgggatatgaacacaagtatcctgatccatccggagctggggatcggtgcggatgcgatcctgccggagaagaggatcattgctccatccctgtgtaagcagatcatacggagagcgcttctgatggaaagtctcggtgaagagctgagagtactttatgtagcgcttacgcgtgcaaaggaaaaactgatcctcagtggaaccattggagctctgcatccggaattgggagaattgtccgcattaagggacagtgaggaaccattgctttctctgggcaggaggcttggcgggaagacttactgggattatgtgcttccggcactggcaagacatcgctgcatggcaccattatttcatgaatatggcatctttatgaataccgcaaatcctctgtacaaagatccggcagaattcaaagttacacgggtcacagcacgggaactgacagaaagcgaggttatggaacaggcagagcgggaaatgaagaaggaaacactggagaactggaatccgggcagagtttttgacagtgagatccgggaggagatccagagacgtttttcctttgtatatccctatcactatctggaagatcttcctgtgaaggtgagtgtatcagaactgaaaaagcgaagctaccacagtgagcaggatctggaagaaacggtggattatgagacggaagaagagatccagccgctggttccccgatttatcgaggagaagaaagaggaagggtatacaggggcacttcgtggaacggcttatcatcgtgtaatggaatgcctggactatcagaagacagcaagcagggatgagatccgcagacagctgagagaatgggttgacgccaggaagatggaaagaaaagaggctgagtcggttcgggtaaaggatatctggaattttgtggaaacacctctcggacagcggatgaaagcagcttcagagaagagacttctgttccgggagcagccttttgtgatcgcaagaaaagcttcggagctcgatccgcagtggcagtgtgaggaaaatgttctggtacagggaattattgatgcgtattttatagaggatgaagaaatcgttctggtggattataaaacggactttgtgagacgtggagaagaacagaagctgatcgaccgttatcatgtacagctggaggattacgcccaggcgctggaacggatgacaggccggaaggtgaaggaatggtatatttattcgtttactcttggagaagcgttcagtctctgatctgaaaatgaaatgatatgttaatgtgggctgatatcctgcggcggagagattacactctccagccagcaggatatttgtttttcaggatcccgtttacaagctttccgaagccgagaggataaccgtccacacagagaaggtgccagccttttttgtgagcggcctcttccggctcgatcataagagtttcgcctttcagataacgggtaagccgctcgtcggaaaccggcagggagataactgcttccacatctcctttgtgaagcgccagcgccagaggctgagacggctcaaaacggtttttcttcagatcacccaggtagaggccgtttcgaagaaaggagattccgcggagatccagcgggaagggcagctgatagtatactttatctttgcggacttccacacggttccagtcaaattcctgaccgccaatggttttcaggccgatctcagagaaaaattcctccagccatttccgggtatttttgtccggtccttttgcggaaaagcggaaaacgggtggaagagagtcaccttttttgcggaacagggcgagaaaatgaccttcgccatccattttgtgtggaaagattcggacgcatttttgaagttcttccggattaaatgcatttaagcttaacgcgatttcggaatcggaagtgtctgctgtgccggcatattccgggcggccgctggagaagccttcatatcctggcatttccataagttccatatccgggcgttgtctgagaagataggctaccacttcttcgtcttcacatggggaaaaagtgcaggtggaataaagcagcattccgcccggacggagcatatcggcagcttttaagaccaggtctttctggatatcagaaagctcagcagatttttccggtgtccagtcgcgggcaagggcttcctcttttcggaacatgccttccccggagcatggagcgtccagaaggatcttattgaagaaagcaggaaaacgctgggcaagtttggcgggcttttcgtcggtgacgagcatatttttcatgccaaaaagctccagattcctaagaagggctctggctctggaagtactgatatcgttggcaaggagaaatccggtgtcatttaaggctgcacccagggcagtggcttttcctccgggagctgcgcagagatccaggacaaaatctccaggttcgatgggaagcctggaagccggtgtcatggcacttggttcctggagataataaagacccgcctggtagtaaggacatcgtgcagggcggctttcctcctcgtagaagtatccggtattgatccacgggatcggtcggatagggaaaggggaaagcgcctgaaaatcctggcaggagagcttggcggtgtttacacgtagaccgtaggtgcggggatttttgtagcttttcaggaaagcatcataatcatctcccagcatttctttcatacgctccagaaaaggaagcggtaatgtctgtattttatctgaatctgtcataatttcctccataatataaacttgactctctcggatattgtgtgaaaagagtggtttccgaaaaatattataaagtatagagggatttttctaaatactattgacaaaactatattatacgatatatagtattattcacagaacaatattacatgacttatcatgtgagcgttggatcgtgaagtgatcgcgttcatcagcatgtagtaagacggaatgtgaatgtccgttttacaggtcatagagaggtgagcagatggtatttaatacaggagcagccctcctggatgcgatcgttctggctgttatttccagagagaaggacggtacctacgggtacaagatcacccaggatgtgcgaagtgttctggaggtttcagaatctacgctgtatccggtccttcgcaggcttcagaaggatgaatgtctggaagcctacaatatggaatatgcaggcagaaaccggaaatattataagctgacagataagggcgcagcgcagctgaatctttacagaagtgaatgggagatctattcatccaagatcaccaggatgtttgaggagggagtttgattatgaacagaaagcagtttatggaacagcttgaacggctgctttccgatatttcagaggcagagagacaggaagcactggaatattatgaaggatattttgatgatgcaggtcctgagaatgaaggagaagtgatccgggaactgggaaatccggggaaggttgctgcgatcattaaggcagatcttcaggagaacagtgaagattacggggaatacacagagaacggatatcaggatacccgtgtgaaagagaacggggaaatgccggaccattatacagaagtaaccgtatacggaaatggacagggagaggcccatcgtgatacgggaaatacagaaaatttcaaagaccgcaggaaaagacgtgcccagcgcggctatcacgcagagaaaaagcagaataaggcaggaatcattcttgcgctgatcgttcttgtttttgcggctcctctgataaaaggattatttggcggagtactggggattttggtgacactggcattgctgccttttctgctgacattttttgcaggagcgggatcgatcatccttgtgatcggtgcagctgcgtgcattgttgttgggattgccatgacggtgtctcttccgccggccgggatcctgactatcggtatcggatgcctgatgatggcatttggacttttgttactgttactgacggtgtggtttacaggtaagatattgcctgcgatcctgcggaaatttacgggattttgcagcaatctcctgaatggaagaaaggcggaaaaagtatgaaacgttttctgaaggtaattctgatccttgcagcagtattcggtgtagcaggcctgggacttactgccggcggagctgccatgggagcgactatgggagatgtgagtgttctggatcatggaatcacgcaggtgcttcgtgttctggatcatgaagacagctgggaagtggaagattccgaggaagatatggatgagcaggaggacgattttcaggcagctgcagaaagcgcggtaactgagaagggcgttctggcagacagtgcagacagttccgcatatacgaaagtatatgaggcctcggctgtgtcagaccttttctgtgatctgagatacgaagaactggttttgaaaacatggaatgaggataaagttcaggtgaaagtttcagggaaggatcacaatcgcattcagatcagcaatgacaacggtagtctgagaattgcaagcaatcaaaaagtgagaaaccgttccatagaaattttttgcccggaaaacttaagctttcagaagataaaacttcagatgggagccggaaccatcgaactggatggtgattttaaagcggagcagatggaagtaaatgtgggggccggaaccattgaaaattccggcagcctggatataaaggaagcagattttacagtcggagtgggaactgctgacatcagtgaacttcaggtggagaatttaaaaggaaactgtggtatgggagatatggagcttacacttacaggaaaagctgctgagtataattatgagttgaaatgtggtcttggaaatctggaggtggatgattctctgggaacatccattacttccggaaataaacagatcacaaatgaaggtgccacgaaaaatataaaactggattgcggaatgggaaacgttgaggttgaatttgaagaagattaaaggaggaagcattatgagcaacaaaaaactttacaaatcatcagtaaaccgtatgttatgtggtgtctgcggcggaattgcggaatactttaatatcgatccgactcttgtccggctggtatgggtgatcatcacgctgatgggcggagccggaatcctggcgtatatcattgcggcgatcattatcccggattaaaaatgacagtacccataaaggacggacatatttttcagaatgcataatttatccggaaattgtccatactccataaaaaagatgaggagtgtggaagatgaacagggagaaagaagtaaaagcatatcttgagggaaagctttcccaggcggaaaaactgaaatacgagattgccgatgagatgggagttctggataaagtgatcaaagacgggtggaaaagcctttctgcaaaagaaaccggacggatcggtggtcttatgacaaaaaagaagaaacataaaaagtaaaatacagcctgaaggaacaaggcgaaatgacgccggaaaagtccttcgggctgtattgaattataagaatatttttctggaaaaaagaaatttttttgacggttcagggtggactgaccagtggaaaagagctatactgttggaataacagaggaggtatgaaggaacatgggtgaaaaagtcaacaacattctaaagggtgagatcatctcctcagtattttatatactgctgggactttgcctgatcctgatccccacgcagacggtggacgtgatctgcaaagtagtattcgggctgatcctcatcggagctggcatttatcatatctatatttacatacgtggaaaagcgaaagctacgatcatggatcttctaagtggtgtggttgtttttgtgctgggggtgtttctttttatgacaccgtccatcgtgatcaaactgcttccatggatgctcagcgcatttgtattggttgacagtctgtggaagtttaaaggagccttccttctgaaaaaaggaggaaacggcgcatggagcgtgcttctgatcggaagtcttgttttcattgcacttggaatcgtgatgctgtttggaagatttccgaagatcatgactctgctgatcttttccggctgggtgctggtatgtgacggagctgcggatatcgtattctatattattatgaagctggggcttcgaaagatcgcaaaaaaggcggagacagagaaggaagattctggtgcagacagttcagatgctgtaaatgaaacggcagatatggatgtgccaaatgatacaagaacccaggatgaaaatgcgccgagtgagcagcagagtgggaaggaaacagaatatccaacagaaactacagcagagactacagcggctatgctggcgcaggatgcagacggatattctgcggacagaaaagagacagaagaatccacagaaccggaagaagagcaaaagcagaagaattcccgatgggaaaaagaaccggagaatgtggagatgaagctctgggctgtaggcaaagaccaggcggaaaccggcagcctgaaggatcttctggacggttccgatgaagaactggaagagtggaaggactgacccttctcttgcatcagctgccattccgtggtaagatgtgcacatgaaaaatacagataaaaatataaagatactgatgatggatttttccggaatatatgaggatcagcagttctggaggggaaaagaagtatcccgggtggaggccagggacattcccggaaccaactgctactgtgatgaggatgcgatgaatgccattcgcagccgtattgccccttattcttccggaggaatccattttattgattccggaaactatcactatatgacaaggatctggctggaaaagatatcggagcctttctcgcttcttgtatttgacaatcacacggatatgcagccgccggcattcggaggtctgctttcctgcggaggatggatctacgattctgttatggaacttccattgcttaaaagggtgatcctgatcggcccggatgaggaagctttttccagagtggaatcggagattcaggaaaaggtggaattcttgagcagagagaagcttctggaaatggaagaggcgcaggtgtgtgcgtttgtaagcaagcatgtgggaaagctgccgctgtacatttctgtggataaagatgttctctgcaaggatgatgcggacacgaactggagccagggggatatgcgcctggatacgatgctggaatgtctgaagagagtcagagaaatatgtgcagagggaatcctgggcgtggatatctgtggtgaatgtgatgtagcagaatctggaaatagcgccttgaatgaccgggccaatgctacattgctggagtgttttctgtccgcatacgggagcgaagatcatgacggaaataagaatgagataacaggaggaaactgatgaaaaatgaacttcttaccatcgggccatttacggtatacggttatggtctgatgatcgccattggaattttggcaggctgcctgactgcagaatatagagccggaaaacagaagcttgacagtgaacagatctttccaatgatcctgtggtgcctggtgggtggatttttctgtgcaaagcttctcttctggatcacagagtggaaatcaattgttcaggatccgggatttataatggaaactttaagctccggttttgtggtgtttggcggtatcatcggcgggatactgacggggcttctgtattgcaggatcagaaagcttgtattttttaaatacgcggatgtgatcctgccatctgtggcactggcccagggatttggacggatcggatgtttcctggcgggctgctgttatggaaaagagacagagagtgttttttctgtgatatttcagaattccgaatatgcgcccaatcacgtggcgctgatcccgacgcagttgtattctagcggactggattttctgcattttcttttgttgttgctgatcgcacggaacaaaaaagaagatggtcaggttactgcctgttatctgatcttttatagcattggacggtttgtgatcgagtttttccgtggggatattatccgtggaagtgtgggaattttgtcgacttcccagtttatcagtatttttacagggattgcggggatcgtgctgctgatacggatcaggaaaaaaagagatagcaagagcagtgtttaaatggatcagggaagtcccatgtatcaggaaaaagttggacaatagtggtataaggacaggttttcgctgcatacatctatgaaaaaggcgaaagcaggcctgtcatgctcagaaaagaagattttgaaccaaatatgaaaacagaggataagatccccggagcgcagacggaaaatccggcacagagtcagcgcttcggggattttatcgtgaaatatatgcagaatgtccaggatactatggaactttttccgggggcatcttttcgggcgatcaatgaaattttcggggttctttatgttccgctggaaagtatgggagaaattgaggtcacgggaacctcctataattcgatcccgaaatgttatacctacatggatatggaggcagcaggggaatcagggatcaacaggctgcacgatcacccttatctgaagctgcgtggaaaaggtactgcggtggcggtgatcgattcggggattgattatcagaatgaagtgtttcgaaatgcaggcggctccagaatcgcttatttatgggatcagtccatagaagaggaagaacaaaatcagtctggacgggagttggaagctgaaaatggagatgcagataatttgccgggggatgatatagcagatacagaagttccatatggcaaattatttcggaaaaaggatatcgaccgggcactggcttccgaggagccgtttgccatcgtgccatccagagataccaacggccatggcacggcactggcaggtattgctgctggaaatatggtacccggagaaaattttaccggagcagcgccggaggcaaccctgatcatcatcaaggtaaagccggcaaagcaatatctccggaatttttatctttatcctccggaggcagaagcttttcaggaaaatgatgtgatgatggccattgcttttgcgatttcccaggccaaaaagctgaagatgccactttctatctgcctggggatcggaagcagccagggcgcgcatctggggaccaatgcgttaagccagtatgtggactatgtggcaaatttttctcaggtatccgtatctgtggcagcaggaaacgaaggaaatacaagaaaccacagtacggggattttttctcagggaagggaacagatcgtgacagaactccgtgtagcggaaagagagcagggctttaccatagaattctggggagaaccgccggaaatctatgagctttccatccagtcaccaaccggtgagatactggaagtcagcagttccataggttccagaacccaggagctgtcatttgtttttgtggaaacaaaggtgtatgtgaattatatcctgatcgagcgtcagaccggatattccctggtgtatatccgatttttccatccggcgtccggtatctggaaaatttttacccaggcaagaaatcaacagaacgtacagttccatatatggcttcctgtggaagggctgatctcccaggatacctattttctggaaccatccccctataccacggtgacagcgccgggagacgccaggaacagcattacggcaactgcctaccagcatcgtgacggaagcatctacattgcagcaggcagaggctatacgccagatggcatgatcactccacatctggcagctcctggcgttaacgtaaaagtgccgctggtacgaggcggctttggaacccgctccgggaccagtatctccgccgcacagaccgccggcatcgcggcacttctgtttgaatgggcgatcatacgggataaccagccgttttttaccgggagcagcgtgaaatattatctgcagagaggcgcaagaagagaagaaaacatgcagtacccaaacccggagtgggggtacgggaaggtggatctgtatcatacctttgaactgctgacgtgagatgatgagaattggaaaaaatatgaaaagcagaaacagatcatttcctttggaaagagtagatgcatagatattacatttggaaaaataataaaaggatacgaaagtactaattttggaaaaaatattcatatagataattcactttgtatcgtgtactataaatatatggaaaaatcatataatgacacaacagggaggaattttacttatggagctttcaactttggtaaaaatgtcaaacacttacggaagcaatccggcctatgttctggcaggaggcggtaatacttctgtaaaagacgatacaacactgtatgtaaagggatccggtacacagcttgctaccattaaggcagaggaatttgtcaaaatggacagagcccgtctgaatgagatcatgaaaacggaatatccggcggatgatgtgaagcgtgaatctgcatatcttgcagatgtaatggcggcagtgaccgatgaggataaaaccaaacgtcccagcgtggaagcactgctccacaatctgtttgcttatacgtatgtcctgcatgttcatccgacacttatcaatggactgacctgcggaaagggcgcaaaggctctttgcgaagagcttcttggaaaagatgtactctggatcgatatctgcaaaccgggatacacacttgcccgcatctgcttcgagaaaatgaatgcctataaagaagaaacaggaaaagacgtgcaggttcttctgcttcagaatcacggaatttttgttgcggctgatactgtagaggagatcggcgttttattcgatggtgtgatcggaaagctggaaaagcaggtaaagagaattgcggatgtaagtgatgcagttacacctgaaaaagagcaggcagcacagaagctttccagtctgcttggacatgcggtggaagtcgtaccggctgcggaggcggatcattttgtaaaagataaaactgctgcggcacctcttctgaagccgtttactccggatcatattgtatattgcggaccttatccgttatttgtagaaaatattgatgaggcgaaaaatgcgatggatgcatttatggcagagcatgataaagagccaagactgatcctggtacagggcgttggcgcatttatcatggaagatgacaaaggaaaggcagcaaaggcacagcttctggtaaaggatgcgatcaagcttgcagtgtatgcagagagctttggcggtccgctgcagatgactgatgagatcacatattttatcacacactgggaagcagaagcatatcgcagtaagaaataaaaaagaaaaatatatagagagaaataaagaaaatgcatcgggaactattaggaaattcccggtgcattttttattgaatgacggataaacagttactcaggacagagttacgcagcaaatgtggatatttttatccgcattaccacaaatcttatttccgatacacgaacgccggcagtccatcctcaccaaccggaacagttacagttccctggatcagcgggcgggcatagcggataaagtcttcggtgacatctgagccgtcttctgtgatccattccacagggaccgtcttttcttcgttgcagataacgttgacatcctccagtgtacatttcatggagtacggagaatcactctgacgtttaaatgcgatcatctttccggtttcgccgttcagggcagcctgtacaccaaattcaccggcgaggatgccttcttgctggtctgttccggagagcatagctgcagagcagcgctggcttacattgagctctacggagcgggctttgacaccaagacggctgcgtacaagattctcaagatatttaccgcagccagcaagcatcttgtgaccgaaggcgtcggttccggcagcgctgtcgtattcgcagatgaaagtgccgtctttatcatggattccctcagatacacagactacgacgttgcagtttttctcgaaggcagcatgaactttctggagaaattcttctacatcgaaatcggtttccggaagataaatgagaagcggattgtctccaacgtatttccgggcaagggcagcagctccggtgagccagcctgcgtgacgtcccatgatctcgatgatagtgacggattttttctcatagacacaggcgtccagggtgatctcacggacggtggaggctacgtagcgggcagcacttccgaatccgggagtatggtcggtgtttacaagatcgttatcaatggtcttcggctcaccgaggatacggatgtcgctgccgatcttttcagcatagcgggaaagcttgctgacggtatccatggaatcgttgccgccgatataaaagaaccagccgatgttcatctcctcgaatttctgaaaaagcttcggataaaccggatcctccagggattccggaagcttgtaacggcaggagccaaggtaagcgccgggggtccaggtaagagcgagaagctgctctcccggaagtgcttcctggaaatcaaggactgttccgtttaaaaatccctcaatgccgttgaccataccataaacatggtcaatctcttctgtatgtttaagtgcttcagataccacaccgtaaagactgctgttgatagctgcggtcggtccgccggactgtcctgcgataaggttcttttttgacattctgatacctcctgggtgttgtttttttatattgtaacagaaataggagaagataacatctaaaaaaatcaccttttttataaaaaaattactctatacaaataattatatcatagtaaaatagtagtatagatagagaaaagaggtgaaaaaaacgatgacagtaaaaaaagtacagtttgagagcatggatgaagtgaaccgttttcttgatgtgacggagcattttccgtttgcagtggatctgaaaaggggaagcagaacggtaaatggcaaatccattcttggagttgcatccattggccttggaagagagatggacttttgtgcacatgtgccggagcttgcgccggagatcacatccagtcttggtttttgcatgaggtaggtttaagaggggaaaaaataaataatggttgatcgatggtgaatgaggatatcgtaagatcgcagaggcgatgatcggtatcctcatttttttatagatgacaaatgtaagtatttagaaaaaaatctaaatacttattgactgggaaattcgaaaatgctatattctatttagaaatatttctaaatactatctgaaaggaggaagacatacacgatggcgtttgcggaaaccttcaaggcactttcggatcctgtgcggagagaaatcctgcagcttctgaaaaacgggaaaatgtcagccggtgagatcggaggacattttgacatgacgggtgcaaccatatcctatcatctgaaaattttgaagaaagcagatcttgtgtgggaaacgaaggtgaagaatttcgtgtattatgaactgaataccacagttgtagaggagctgcttctgtggctcagtgatctgaaagggggaaagaatgatgaaaggtgaagaaagaaaagagtttctgaaggaatataaaatgtccctgatctccgggagtatccttacgatctcaccgtcactggcagggatcctgctgtggaaccgtctgccggagaagatcgcaacacattttgatcagcacaatgtggccaacggctggagcagcaagccgatggcagtttttggaattccatttctgcttttgctgatccatttgttttgcgtgttttttacagccaatgatccaaagagaaaaaatatcaacaggcgtatttttaccatggtcctgtggctggttccggtggtgtctgtgatcacctgcatgtcaatctatggtcttgctctgggtatggacattgatataggtgtgatcgtgaatatcatggtggggatcatgtttatcattctcggaaattacgttcataaggtgaaacagaattatacagtgggaatgaagcttccctggaccttgaacagcgaggagaactggaaccgtaccaaccgtatgacaggctggatactgatcctgtcagggctgctttttcttatgaattcgctgctcctgaaaacggaaattgtttttgcggtaattttgctggtcatccttgtgccaatgatctattcatttattctttataaaaagggaatctgagaaaataatttcggaccgtcactgtcagaaaaaaggcagtggcggcttcttttttatcaaaaaataatgttcaaacaaagcggtacgtgatatgataatgtcatacaaaagcattttctcgaacactataaacagacagcagacaggagggatcattatgacagaattaagccgttttcaaaaagatgtggaagttgctgccactgctcttgaaatgcgggcggagaacgaggatgccaaagaagaggccattcatctttaccggaaattcggaagtaccaagcaggagccgctgcggctggcagttgccctgcggggatattttctggaggaaggtgtggaggaagaggaacgcgcgcattatggagcatatcttaagaaaaggatccgtccggctgtggaacgcctgatcctggaagatgactgggaaaagatcgagaagctttatgagaacgaatggtttggggaacaggagctggaggtgttcctgaaactggctgaagagtggaggagacctgcagcgctgatgggacttctccatttgaaaaaagcaaattatggatttaaagagaaggaatttgaattgtaaataaatctggtgaaaaactatagcaatccaataaattattgcacataattacacgaatgaaaccaccctatgcagtcctttggacgaattgttaaaaatccttttgaaatagctgatggtaattccgatgcaatccgtatcttttctttccttaaaaatgctttgagttttgaccacatcttttcaatcggattcagatccggactatacgggggtaaatacagataggttacttttgagctgtccagtagctgtttcaccacttttgcatgatgggaacgcatattatccataacgataatgtctgcttctgaaagcgtcggcagcaactttgttttcaggtattctgcaaaccgctctgcagtagttcctccctgatagactgtataggcacagtctccattcagacgtatggaagaaagaacggttgtattgcagggcgtgttgagtggagttttatctactgctctccggtttttccatgctctggcataatgtcgcgtcatattgatgtttactccgctttcgtccagaaagaccagatgatttatgtctctctccgacatatgttttttccagtttctgcgtttttccctgacatcggggacgctcctgctctgaggtatgaagagattttttcttgtaagaatacccgagtttaataactgccttgcggactgtttcattacaaacatgcagaccaagtttatcaatgatttcatcaattgtgatatctggttcctgctgaaccacccggtcaatattttggatatcttacggtgtcagggcatgtttacgtcctctctgtgatgttcttgtttttacagaacctgtttcacgcatttgtttttccaggcggtaaacagtactggtattcacagaaaaacactctgggatttcttttgcattgtgcgttttattccaagcttcaataagtagtttacgtgtttcatcatgtaatataataatcacctcttgactctatcatagtcctgttgtcaagagtgtgcagtatttttttggagtgctataagaaaatattgtgagtattgaactggggctgtcggaaagacagcccctttcctctacaggtggtacgcgaaaaatacaagtccttttatgcacgtaagaaaaaacaaagtgcagaaagggcttatattatggaaaaacagaaaaaaacatggaacaaaataataggagaaaacatacgaagactgcgaatcagtcataatgagactcaggcagaactgggggagagcattggttatggttctacaactattgctaattatgaaagcggagaacgtctcccggatcttataacggcatatgcgatagcacagcgttatcatgtcgaaatggaaaaattgatggaagaagacttcacgaatcgtgaatacaaagagaattaaaaagaactatacttataaaaaagaataagtaaaggagaaggaaagcatgaaagataaggaaataaacaactttatcagagaaacaggtaaaatgggtgatatctggacgaaagagcaggtcaaagatgtataccagaatgtttcattggaggaggcgctggcagaccgtcagagatcatatgataagatgaaggacatgcttgactagatgaagaaactatgaaagaagaatcttcagacatagaactaaatggactatcagataaacagatagtggatcttttgagagaagtaaatcaggaagtaatccagtcggctggtattatttacatgtggtgagggacaaaatatgttacaatgtaaaacagatattaaaatagtagcaggtgatcagcataacagtattgacctgtcatgagcaggagagggattgatgaaacagaacagcaaagtaatacatgaaaaatatgaattcagaaacattcataaggatgaaattgaacaggctgcagagattgaaagcatctgttttccgccaaatgaagcgtgtacttatgaacatatggagtcacgaataaaaaaagcatcggatctttttctggttgttgtggatcgggagacaggcaagattgcaggttttcttaacggacttgcaacagacagagaacatctgacagatgacttttttacagatgcgaatctacatgatccggagggcgtaaacattatgcttcttgggctggatgtgctcccagagtaccaacaccaggggctggcaagaaaactgatggaacaatataaggaaagagagcgcgccaggggaagaaagaagctgatcctgacctgcctcccggataaggttgagatgtataagaaatttggctttaaagaccatgggatcggcgattctgtgtggggcggagaagcctggcatgagatggatagtattctgaactgattttagcttacgaaataaaaaggaaaatcataatggcaatcaatgtaaaaaatagaataaagagaaattgctgagaaagctcctatggtgtcgaaaggcattgtaggggctttttatattctttaaaaaccgcgaaattgtgaataatatacaaaaataatttgataaaaccatacataatgcatgaaatgaaaaaagcatatttacaaaataaaaattaaatgatatattaaaaaaaacaaacaatatgaaaccggttgacatatggaaaaagtcacaatacgaagggagaacaaaatgaagaaaaaggtaattgcacttgcattaacagcatgtatggtaccagttggtagtggggtggatgtaatggctgccaagggagattccggggataaaattacattaaactggcagagctatgacagctatgataaatatcagaaagttgtcgaagcttttgaaaaggaaaatccggatattgaaattaattttgaagaagtatcagattatgcaactaaaattttgacagaagctacagcgggtgaccttccggatcttatcaactgtaatacaggaactacacagattcttgcaaatgccggggcattacagaaattcgatgtagatgcactgaaagcagatacagaatataaatttgatgatttctgggatgctgcagaaaactattgtacatatgatggtgactggtattcacttccattggacggaggaaattatggatgggtttacaacgtcgatatgtttgacaagtgtggaattgaagttccggaagatggatttacatgggatgagtttacagatgcatgtaaaacattaatggaacacaaagatgaacttggaatcgaatatccgacaattatcaatgatctgtcttccgcaatcgatactatgtatccatggattacagaagctggtggaagctacttgaatgatgatgaaacctgtggatggaattcagatgaaaccgttgcggctttcgaatatgtcaagagtcttgtagatgaaggttatgtgccggcaatagaaaaactgggagacggttatgatgcactgattacaaaatttaatgcgggtcagattgctatgtgtcgtgtggctctctggaattcaacatatcttcaggacgatgtaaactggaaagcaatgaatgcgccacgtgcaaatgatggtacacaggcagaagtacttttcctgaatggtattggcatttcaagcagctgtgaaaacccggaagcagcagaaaagtttattaaatatctgaccagcgaagaggggcttgcattatatcttgaagataatacatctccacagattgcagtaagaaagtctcaggcagatctttccgtatctatgtttgacgaaaaccatgatatgaaattgtttaatacaggactgaaatatgcaggatatattgaccttacagaaacatttgcagaccagcagacgatcattggacagtattttgatgaaatctggcataatgatgctgatatcaagagtacgctggatagcatggcagatcagttaaatggtttacttgctcagtaactaagaataaaaggatgatatggaaaatactctgtatcatcccttggatttaactaggagggattcatgtgagtaacgcaaaaacagtagtaaaacgtaaaaaaggagactggcggattgctgttttgtttctgttgccgtccctgattttgctgggattgtttgtattttggccaatggtagattccatccacatgtcattttatgactggaatccattaaaaggtaagatatttacaggattagagaattatcaaaatctgctgaaagataaactctggtggacaagtctgggcaacacgatcaagtatatcctgatgaatgttccgccaattgtcattttttctatcattatgtgtgaacttgtgttgtttgcaaataataaaagtgaagttatttcgaaatttatcagaggcagtttctttttaccatgtgcactttctctggttgcaaccggtgttgcatggagatatctgatgggaacgaattatggtgttatcaataacttcctgagtgtattgggattcgaaaaaattggctggctgacagatggcaagattgcactgggttctatggcaatcgtaacaatctggagatgggcaggatattacatggttatggttgttgcaggacgtctggaaatttcgcaggaattttttgaagcggcagatctggacggtgcaaatgcatggcataaatttgtttatattacattgccgcagctgaaaccagttcttacatatattattctcatgtgtgtaatcggtacgttccaggaatttgatcttgtttatacgatgacaaatggtggacctggaacaagtacgtatttaactgggctgacattatataagactgctttctcatctttgaaaatgggatattcctgtacaatggcagtatttatctttattctttcgattattatttcggttgtacagttaaagttgacaagtgacaaagattgagaagggagaagagattatgaccagaaaattaagaaataaaattctgggagacagcttaatctgggtaattatagctgcatttgtagtaatcatgctgtttccatttgtttatatattatctactgcattgaaatcggatacagatcttgcaacaagtgttggaagaattttgccgaaagcagcgcaatgggagaattttacaaaagcatggcagctgctggattttcccaagtgcttttttaattcatttattgttgcgatagcagtgaccgcacttactattttcctctgtagtttagctgcatatgtatttaccagacttgagttcaaaggcagaaatattgtttttattctttatttgtcaacgatgatgattccgattactgtaagactgattccgtcttataatctgtgtagaaatctcaatatgctggatacatatatggggatgatacttccgcaggtagcatggtccattccgtttggaacatttcttatgcgccagttttatatgggaataccgaagcaactggatgaagcagcaaaaattgatggagcaaatcatttccagatattctggaagatcttactgccaaatacgaaatcaagtatgacaacattaggaatttatacatttatttctgcgtggaataatctgatctggatgttgttatccgtcagaagtgaaggcaaatggacagtaacattgggaataagttcaatctgtggcgcatctgtaatcaaacagccgacatggaatctgatcatgggtgttatcgtgattggaatgattcctgttctgattctgttttttgcattccagaaatattttatgcagtctgtagctgcaaccggcattaaatagtaaaaaggagatcagttatgaaaggtttagtggtaacagaagacaataaactgtacctggaagaaaagcttccgattccggagatcggagagtatgaagcactggtaaaaaatgaatgctgtatgatctgtaacggaacggatctgggagttattggaggaaaagtcagagaagtaacgagatatccggcggttttaggacacgaagatgcaggaagagttgttaaaatcggcaaaaaagttacttcttttaaagtgggagatcttgtagtcagggcaggacaaccggataatgagaaattttccagcgcttggggcggatttgctgaatatggaattgtaaaagattataaagcagccatggcagaccaggccgatgtaaaagatattaatcttggaattacacagcaggtgtgcccggaaggaatgcaggcagaagctgcttctatgctgataactttaaaggaaacatacagtgcattaaaaagaatcggcgttgaagataaaaagaagatggtcatactcggagacggaccggttgcgcttgcttttctaagctgtgcaaaactgatgggaattcaggagatttatgtcctgggaaatcacagagacaagctggaaacagcagaaaaactgggagcagcaggtacatttcttaacaaagacgaagaagaaaagaaaaaagcttctgatctgtttgacagaaagtccgatatctgtatagatacgattggatcaaatcagacaatcacgcagtgtctggactatattaaagagacagggacaattgctgtatatggcttaaaaagcggagaaaatctgaatgtaccattaccggaactcaggaatttcaatattcagtatgtgcagtggccggtgcctgaggtagaagcagaagtacataagccggtttgtgatgcgattatggatgggaaaatagacatcgatttatttgtgacacatagattttcaatagatgattatgaaaaaggatttcaggcagtaaaagacagaactgcattgaaggtagttttaaatttttaaggcaactcaggaggaacgcatgatggcaggttatcgattcaataaagaagaatattttaaagagaccaaagaggtatattctaattatccaaccgatgtttccagaatggaagaagaactggaccgcctccagaaagaaaatccaaaggcaagctcttttcagaaaaaaacatggatctacagaattgcagccagggatgctgaagtgattctttttccatccagtccgttttatgcagaaattgatacaggaagagaacagaacagtgttacggcatcgttcccgccacagccaggcattggatgttggctaatgaagcaatacccagattttgtagatgaatatggagaatggagtggatactacggaaaatatggtgtcatgaacggaccacagtttatggatgcggcgcatcactatgcaaattgtgaaactgtgttgaaatatggtctatcaggaataatcagacatgcaatgatgcgtctggaagagaaaaatcttacagatcatcagcaggattttttaaaatgtatggtcgatgtatgccgaagtctgcaaaaaatttctgaaagatttgcagaaaaagcggaggaaatgctgaaaacagaacacgatgaggaacatgtaaaggcacttaaaatgattgctgttacggcacgccgaattccatctgaaccggcagaaacattttatgaagcaatgtgtgcaatctggtttacgcgtgagatgtgcaatgcgttagatggtcttggatttgctgtgattggccatttggacagaatcctgattagttattatgaaagagatttgaaaaataatcgaataacgccggatgaggcgcaggaactggttgactgttttgtatcaatgacagatgcaagatgggatcttgaagcagacctgccagggggcacaaatgcagatattattataggcggatgtgataaaaatggcaatattgtttataatgacataagcaggatgatcataaacagttataaaaaatatcattttgcaaatccgaaactacaggtgagaatatcggcaaagcatccggatgaatttctgatgcaggttggtgaattggcaggaatgggtctgaatgtgctgtctgtctttaatgatgatgtgataattccagcaaatcagaagcagggaaaaagtctggaagactgtcgactttatgtcgcaggtggctgccaggaaatctgtctttctaatgaagtcaacagcagagcatatacctatcttaatcttgtgcagatgttaaatggatccttatatccagagtactggaatgacgtatttaaaagggatggatttaaatttattccagctgcgaatgcgagcgattttgaagaattctatcatattgtaattgaaaattatagaaatgaactgaatttctttgtgaaaaaatataacgaatatggttcatggtggaaaataataaatccgtcgttgttcttttctgcaactatgccatcatgtactgagacggcaaaagatgtctcagaaggcggtgctgtctataatacagataattttgctgctgcgggtgcagggacagtaattgattcgttatatgcgataaagaaggcagtatatgaagataagattacgacatttggtcacctgcttaaagcgatgaaagaagacttcagagatgatgagatccttcgacaatatttgcttcataaagtcccaaaattctgcaaggataaagatgctacagaatttggaaaaaaggttatggatgatctggctgaatgtcttggaggacaggcaaattacagaggcggaaaatttgagccgtcattatttgctttttattcttataactggtttaaaaatgtaacgattgcaacggccgatggacgaaaaagtgaaagtgctctctcacgaggcgttaacccaagtgaaagtacagaaaacatcaatattgcagcattacttgatgcaataaaaacaatggattacacgaaatatccgggtggggcagttatttatatggacattccactgatgtataaaactccgcagccgtcattgtttgcaagtgtgatgcgggccttctgtgaaaatggcggaagcattatggattttaatgttatcagcaggaatgcacttttagaggcacagaaaaatccggaaacacataaaaatattgtagtaagagtgtgtggatacagtgcatatttccatacattgactgcggaaatgcagaatgaggtaattcagcgtacacagaggtaagcggtaaaatgaagcaaaaattactggtaagtcagatacagaacttttctctgcatgacggaccgggaatacggacaactgtatttttacagggatgtaatttgcggtgcaaatggtgtcacaacccggagacatggaaaaaggaaagtatactgagttatacggaaaataaatgtattggctgtggtcagtgtattgaaatctgtccctcaggagcacaacagatacaaaacgggcagcatatttatgaaagaactctttgtactgtgtgtggaaagtgtgtggaaatttgctgcacagaagcattggaaatcgtaggaagttattattctgctgaagaattatcggaacttttgctcagagacagaagactctatgaaatttcagaaggtggtgttactttttccggtggagaaccaatgatgcaggcagagattctatatgatttgtgcaacagacttcagaaagagcatatttcagttgcttttgaaacagcacttgcttttccttggaaagtgatacacagaatgacagaatgtgcagatctgtttcttgtagattttaagatgtttgacaatgaaaaacataaagaatatacaggaacagaaaataccctgatcaaagagaatctgaaaaaactggtgaattacagaccgatcatgatcaggcttccaattataaaaggaatcaatgatgagatagaaaatgctgttgcaacagcagatttttttgcagctcttggaagaaacatcaagagtgtggaatttttgccgtatcatgattttggagttgaaaaagcaaaacatgtcggagtgaatcagcagatgtttgaagcacctgatgaaaaacagctggagctgttgaaagaagtttacagaagtaaaaagattgacgtagtggaataaagaagattgctaacagaaaggaacagagacagaaatgaaaaagcattttctgaaaaagcacgaagaaaactggttgcgcattccttatgaagagaatgcagatccatgtattataactatttcagacagtactggaaaaaaagaaactattcagatgaaagtatctaagacaagagtggactattggatggcatatcccctgaaagattttttcggggacgatattcaggcagaaggtccggcgagcagatggatcaatgcaatagaactttctgatgatccggaaaaacagagaagaagagaactgtctaagtctgtcattcattatatgccgccaaccggatgtatccgggaactgaacagtgtaaaaaaagcaggagaacagtgggttttagattgtgtaaccgatccatgttcactgacaggaaatgaagaaaatcaaacagctatgagacttgtaagcaaggatctgctgcactggaaatccgaggagaatgagttagaagaaattgaaatcaactgccggaaatcagataaatggattggagatgtcgaaaaacaaatagaatttgaagaagatggaaaaatctggattctaggtcagactgcgaaaaaaacgtgtgaaggtgttgcatcatctaatgcaatcagtattccatccgttttttcaggagaacagataaagccagctgcacagatggataatctgcgagtgtgggttagacagtggcataatgagcatattgataaaaagtttgaatttctcatgagatttcgtcagggaccagacgtatggccggaagtccgacttctggcacctgaaaatattttatctgatattcagacaaaggcctgtgaggtagaactggagatgtttgtcggacaggaaccggaaattgagtttgagctgtgtggagtgaagtgggtctggaaggcattagatcagacactgaactgtcagggatataaaatgaaaattccaacggaaaaaggaagactgtatctgcatttctacagggacatggcaattcaggaattatatgcagacagaaagaatgcaatgctcatagtacaggataatggaccgaaaaaagaagattataagattcgaagtgagcaggtggaaaatatcaataatccatcattttatctgcaatataatgcggacccgtattttgaaatccatacgaatggaaaaacagcctctgtcatttgtctgaatatatggggtttaagatctacgagatatgaagaagaaaacagaaggctgatcgaacaggaagaaaaaggacagccgttgtttaaatctgaatcttacacaatatatgagaaatgtgtagaagatcgtatttatggagaacctgcagcatgggcactgcgtggtggaaaaatagttttatcacctgtacgcgcggtggaagaattctgctggagagatactccgtggggagacatgacaagaatccagaaccgaaccgagcgttgggacgcaccggaagattcagcctacccgaaattacatacagagcataacgtcataaatgcagcattttcgcttgcaacagatattatgtgtcagaacagaaataaaaagtatgccttgccaggacaagaaggtctgatgaatgcggctgtttttcaaagagaaggagaaggttttggaagttgggtaagagatacctgccatgcagcatttcgatgtcagaatctacttgcaccggatgaagccagggagtcgttatcctatatttctgaacatggatttaataatggtgttgactgtgctgccatgccggcgattgcagcatgggatcattatataacaactggagatatccagcttttgtatgaaatgttacctggaattataaaatatgcagaagaagcggatgcacgttatgatgaagaaatgcagctggttcatgcaaccatgtgtcttgcgcaggatgcttttgaagaaccggagaatggcggatactgtcttggaacagaaattgcatttgccctgatgtatcaggatgtcgccagaatatgtgaggtgacaggatgctatccggagagaattaagttctgggaaagtcgttcgaaggaaatgcttgcatccataaaggaaaaatactggaatgaagaaaaagaatgctttacaagtggaccaataggaagtgaagcatacgaaaaaggctggtgggagacgactggggcagaaatggttttgtggccacgatttggtattgcaactgagagacagagaaatctgtttttgaagacaatcgaaagtaatccagaggcattttctgagtttggaattaactggtatccgttccgcaaagaaaaaaaccatttctggagagcatgctgggtatcatggacgcttgggttatcagaggcagctggtgaaagtggaaataaagagtttctgaaaaaacttatttatgcacaggtgagaaatgtgctcctgaataaatcttttcatgaagtaatggatgttgatacaggaagagcgtggagatggccgcacctgccatggcatgcggcaggttttattggatttattgttaatggaatttttggaatacgttatagtgaacagggaattcagatacatccatgtattttggatgaatttgagggagcagtacttgattctgttccatatcagaatgcaaaatttgtatttgagatacatgggcatggtgacagctatacagtaaaaatggatggaaatctggtggaaggttcctttggcaaggaaatgacaggagagcataaggtggatatatatgcttatgaaactgaataaaatcggtatggtaagaaataactgtgaggatagaacatgagcataaagaaagcaattgcagccggacatatctgtctggatattacaccggcttttaagagcaaggaagaaaaaaacatcaaagaccttttcagaccggggcaactaatcgcaatggatgcggccaaagtaagtcttggcggatcggtatccaacacaggtgttggcatgaaacgtcttggcgcagatgtagaactaatgggaatggtcggagatgatgcatttggtcagatggttctcaacgaactggaaaaatatggtgcatctccggagagcatgattgtaagaaaaggagtcggaacttcttattctgtaatccttgcaccggcaggcattgacaggatcttccttcactgctcaggtgctaatgatacatttactctggatgatatcgatctggaaaaggtaaaaggagcaaatctgttccattttggctatccatcgctgatgcggaagatgtatattgatggcggcaaagaactggttcgtcttttaaaggctgttcatgaacagggagttgcaatctctgttgatatggcaatgtttgaagaaagtacagaagcaggtacccaggattggaacgaagttctgaaatctgtgattccgtacattgatttctttgtgccgagtgttgaagaactctgcattatgctggaccgtgaccgttatcatgaatggaacgaaagggcaaatggttcagatgtaacgaacttccttgatgttgaaaaagatatcaggccactggcagataagcttctctcctatggtgcaaaagttatcctgatcaaatgtggtacaccgggcatctattttcgcacagcagccaaggaacagcttctgaagattggtggtggaatcggagaagagattgcggagacatgggcagtcaaagaagcttttgagaagagttatttcgtagaaaaagacaaagtcgcatctggaacaggcgccggagatacgacgattgctgcattcttaagtgctatcctggaaggcaaaagctgggaggatgctcttcatcttgcaacagcgaccggagcgctctgtgtacagacctatgatgcgctcagtggaatcattccacttgatgaagtacagaagaagattgccgcaggttgggaaaaaagaaagtaagaggtagaaaaaatgttagttaatatgaatgatgtgctttatccggcaaaaaagggaaaatatgcagtaggactatttaatgcggtaaacctggaactggcgcgaggaatcattgcagcagcagaaaattctcagtcaccggttatcatgggaactgcggaagtacttcttccatacggaccactggaagaggtttcctattatcttattcctatggctaagaaagcaaatgttccggtagttattcatctggatcatggccttaagaaagaaacatgcctgaaagctctggaacttggattctcatccattatgtatgactgctctacagattcttatgaagataatgtaagaaaagttaaagaaatggcagacatcgcgcattcttatggagcaaccatcgagggcgaactcggacatgtaggtgacaacccggattctgcagagggaagcgcccatatcaatccggctgatttctatacagatccgaggatggcaaaagactttgttgacaaaacaggtgtggatgctcttgcaattgcagtaggaactgcccacggggcatataagttgcctccaaagcttgattttgagagaattaataccattgctcatacagtagatgtaccgcttgttctgcatggcggttccggacttacagacaacgacttcaaacgtgcgattcaggaaggtataagcaagatcaatatttttacggatatcaatgtggcagcagtagaggctgaattccgcaaatttgaaagtatgaataaaggtatcattgatttgattccggcggcagttgaggctgttaaacaggaaaccatgaagaagatgatacttttctcaagcaatggaaaaggtgtattagaccagccatcccaggatgaacttgtaaaagctgttgttcagggtgttctcaaagaaattgttggaaaatagggtattattgatccgagcagaaacagaataagaggttgactagagcattttgaagattttgtgtgcaaaagtagagtttggcttgcgaaatacatgaataaatagttataatataaagaaacaagcgaatctgtaaaatcacggaggattgaatggcaaatattaaagatgtggccaaactggctggagtttctgtaacaactgtttcaagagtattgaataataaagggtatatatcacaggatacatacgaaagtgtatataaagcaattgatcagcttgattatgtcccaaatcagattgctagaaacctttttagacaaaaatcttattatattagtctgatcgtgcctgacagctcgcatcctttttgggcggaaataacgaaatacatcgaaaaaaaactttataaacatcattataaactttttttatgtaataccggagatacggaagataaagaaagagattatataaaaatgatgagagaaaatatggtagatggtattattcttggaacgcatatgttagcagagtccgaatatcagaatctggatcttcctattgtggcatttgattatcgagttgcggaagagattccaaccatctattctgaccataataagggtggtttgctggctgcaaatgaaattataaagaatgactgcaaatgcgttttaaatgtaacggctgttgtaacagataaatctccttctattaatcgtcatagggttttttcagaaacattgaagaaaaatggtgtaaaatgtatcgattatatctggaatacaaaacaaagaacagaagaatatcatcagcaaatgaataaactttttgatgaatatccggaaatggatgcaatgttttcggaagatttgatcattatgaatgcgttaaaatgtgcaggtgagaggggaatgtgtattcctgatgaatttaaagcagtaggatatgatggaacgctgattgcaaagataagttatccgtcaatgacttatgtttcacagccaataaaagaattggcagatacattggtagatgtattattaaagaaaataaatggtgcaaaattacatgaagatattattttgaaggatgtttgtctggtgaaagggcaaacgacagaatagaataaaaaaaattacagagaaggttcctatagtgttgaatggcattgtaggagctttctctgtaattttttttaaggtgtacgatccagatgagggaaaaagggcgttgattttatagagagaatatccacacctccgtttgcagacttgaatttaccttcatttgatattataatcaaagagattgaaacgaatcctgaaaacagcgggaacatctaattttaaggaggaatcttattatgagtacctggaacaacctggatactcttgaatctttcaaagaactttcaaatgtaaagaaagtaaaccttgtagaagctatgaccggagaaaatggtgcagaacgtgttaaaaaatacagcgtaccgatggctgctggtcttgcatataactatgctgcaaaacaggtagatgacgacgtacttgaaggtctcaaaaagcttgcaaaagaagcacagcttactgaaaaatacgcagctctctacaatggcgaaatgatcaatacaggtgagaaacgtctcgttctttatcagctgacacgtggccagcttggtgatactgttacagctgacggcgttgacaaacgtgctttctatgtagaacagcagcagaagattgctgactttgccaataaagtacatgcaggtgagattacaaacgcagcaggagaaaaattcacaactgttgttcagatcggtatcggcggaagtgaccttggtccgcgtgcaatgtaccttgcacttgagaactgggcaaagaaaaatgacaaatttaaaatggaagccagattcatcagcaatgtagatcctgatgatgcagcagcagtcctgaattctattgatgttgcacattccattttcgtactggtatctaaatcaggtacaactcttgaaacactgacaaatgaatccttcgtaaaagatgctcttaaaaatgcaggactggatgcttccaagcatatgatcgctgttacaagtgagacttctccacttgctaagagtgatgattatcttgcagcatttttcatggatgattatatcggtggacgttattcttccacatctgcagttggcggtgctgtattatctctggcattcggaccggaagtatttgcagaattccttgaaggtgcagcagaagaagataaacttgctaaaaacgaagatgttatgcagaacccggctatgctggatgcgctgatcggcgtatatgaaagaaacatccttggatatccaagcacagcagttcttccatattcacaggcactcagccgcttccctgcacatctgcagcagcttgatatggaatctaacggaaaatctgtaaaccgtttcggtgatcctgtaaattatgtaacaggaccggtaatctttggagaaccaggaacaaacggacagcattctttctatcagcttcttcatcagggaactgatatcgtaccgcttcagttcatcggatacagaaataaccagatgggcacagatgtagtgatccaggacagcacaagccagcagaaactctgcgctaacgttgcagctcagatcgttgcatttgcatgtggtaaatctgatgaaaacagcaataagaactttgaaggtggacgtccgtcaagcatcatcattggtgatcaggtaaatcctgcaagccttggtgcactccttgcacactttgaaaacaaagtaatgttccagggattcctgtggaacctgaacagctttgaccaggaaggtgttcagcttggtaaagttcttgcaaaacgtgttcttgcacatgagacagatggagcactgaaagtattcagcgatctgctgaatatctgatttgaaagttagatcaatcatgaaataatacaagcccttcgcttacaaattgtaggtggagggcttgtgttttacacgtggaaaatcaccttgtaacttgccattaaacaggtcaaatgataagatatatgtaataatcttttgaaaggagcaggatcatggtatatggaaaaaaacttcccattggtgtggatgattttgaaaagttgataagagaagatttttactatgtggataagaccgagatgattgcagatttgttgagaaactggggtgaagtgaatctttttactcgtccacgtcgtttcggaaaaagccttaatatgaatatgcttaaatcattttttgaaatcggctgtgataaaaacctgtttcagagtctgaatatttcaaaagaaaaagaactgtgtgagacttatatggggcagtttcctgtcattttcatcagtctgaaaggtgtagaaggtcagtcttttgaggctgcatgtaagggcctggcaaatatcataggtatggaagttttgcgattttctttcctgaaagacagttcgaaactgacagaagatgaaaaagcactatattctggatatacgaatgtaaaagaaggagactttgtaacagcctccaatattgacagtttagtttcttctcttaagaggctttctacattattatagcaatccaataaattattgcacataattacacgaatgaaaccaccctatgcagtcctttggacgaattgttaaaaatccttttgaaatagctgatggtaattccgatgcaatccgtatcttttctttccttaaaaatgctttgagttttgaccacatcttttcaatcggattcagatccggactatacgggggtaaatacagataggttacttttgagctgtccagtagctgtttcaccacttttgcatgatgggaacgcatattatccataacgataatgtctgcttctgaaagcgtcggcagcaactttgttttcaggtattctgcaaaccgctctgcagtagttcctccctgatagactgtataggcacagtctccattcagacgtatggaagaaagaacggttgtattgcagggcgtgttgagtggagttttatctactgctctccggtttttccatgctctggcataatgtcgcgtcatattgatgtttactccgctttcgtccagaaagaccagatgatttatgtctctctccgacatatgttttttccagtttctgcgtttttccctgacatcggggacgctcctgctctgaggtatgaagagattttttcttgtaagaatacccgagtttaataactgccttgcggactgtttcattacaaacatgcagaccaagtttatcgatgatttcatcaattgtgatatctggttcctgctgaaccacccggtcaatattttggatatcttacggtgtcagggcatgtttacgtcctctctgtgatgttcttgtttttacagaacctgtttcacgcatttgtttttccaggcggtaaacagtactggtattcacagaaaaacactctgggatttcttttgcattgtgcgttttattccaagcttcaataagtagtttacgtgtttcatcatgtaatataataatcacctcttgactctatcatagtcctgttgtcaagagtgtgcagtatttttttggagtgctatagtttgatcagaaggacaggaggcggattcggtggaccggaatcaggaagaactgggaatacatatcctggaaaatgtgaggaacgaactgtactactattttccatatctggacggtgcttttgcctgcatttccgggaagggttcggaagagaccagaaccattggaacagacggagagttcttccttttttctccggaatatctgctggaactttatgtgaaaaagccggaggcagtgcgacgagggtatttgcatatgttgctgcactgcctgtatctgcatctttttcgggaaaatcaggaagacagacgtttatggaacctagcctgtgatattgcggtggaacagatcatttccagagaaaagatcccggttctggagacaggtggaaatgaaaaaaaaatccggaaaaaagttttccatatgcttggaaacggcgcggattccgcagaaaagatctgccagaaactgaaagatcaggtatttccatttcgattggaagagatggaagaagcgttccattttgatgatcactcactatgggatgcctgcacaggagaaaaaggaaaaagaacaaaggaaaaatggaacaagcttctttcctatactgccgcaaaccgtcaggatcaccggaaacggcggggaagtcagaaaggggaccagaaggaagaggcaggaacggtaagatccggaagatacgattacaaaaaatttctccgtcagttttctgtgctgcgggaagaggtggagctggatacggaaagctttgattatattttttataattacgggatggagcattatggaaatcttccgctgatcgagccgctggaatataaggaagtgaaccgtctggaggagctggtgatcgccattgatacttccggctcctgtgatggagagactgtgcggagattccttggagaaacgtattccattctcagtgaaaaagagaattttttccataaaatgaaggtgtacctgatccagtgtgactgctgtatccaggatgttaaggtgatccattccgaggaagaatggaaggaatacagcaaaaatatcaccatacagggccggggcggaacagatttccggccggtgttccggtatgtgaaggagcagcaggagaaaaaagaaatccgcagtcttaaggctctgatctattttacagacggggatgggatatatcccggaagcaaaccggattatgaaacggcctttgtatttttacataaaacagaaaaaatggagcttgttccgccctgggcgatccggcttgtggcagaacaggaaggagtgcgttacagaacatgaacataaaagaggcaaaagaagagatcaaacataccttactggcttacaaccggaaggatgcagccggacgctacacatttcccaaactccggcagcgtcccgtcctgcttatggggcctcccggaatcgggaaaacagcgatcatggagcaggtggcagaggaatgtaatgtaggtctggtagcctataccattacccatcatacaagacagagtgcggtaggactgccaaggatcgtgacccggtgctacaacggaaaagaggtcagcatcacagagtataccttaagcgagatcattgcttctgtgtatgattgtatggaacgtaccggaaagaaggagggaatcctgtttatcgatgaaatcaactgtgtctccgagacacttgcgcctaccatgctgcagttccttcagaacaagaccttcggaagccacagtgtgccggaaggatggctgatcgcggcagcaggaaatcctccggaatataataaatcggtccgggagtttgatattgtaacactggaccgtgtgcggaggatggatatcgaggcagatcttgaggtgtggatggagtatgcctggaaaaaggagatccacggatcgatcctggcttatctcggcatgaaaaaggatcatttttattctgtggaaaatacagtggacgggaaattcttcgtgacagcaagaggctgggaagacctgtctgagatcctgaaggcttatgaggagctgggcgtggagatcacagagaatctggtcggggagtatttatgcagagaggagatcgcaagaagcttttttgccagctatcagctgtaccggaagtacggagaggactatggcctggaacgtctgctttccggagagatgccggaggaggaacagcagaaaaaggtaaaaatggcgaaggaagcttcctttgaggaacgcttccttgtgacagggcttctgcttgacggtctgaacggaggttttctgacctatgagaagatggatggtgagacaggtgctgtttatcaggaacttctgcatctgaaagcttttcttcaggataaaaaggacatgacagcgctggatgaatttacagatatgaagaagaaaagtctggctgtccgtctggaggcggagcttcttaccgcagatcagcagactacagaagagcttgtgatccgcactctggaggaattcagccttactatccgaaaggagcatatcacagaaacagaggctggctttgaacggatccggcagctgtttacggaaatggcggagaagagaaaggcctgtgcgaaaaagatcagcggggagctggaacaggcatttgcatttatgaaggaatgcttcggggacggacaggaaacggtgctttttgtcaccggactgacccggaacagccatgcggcggcctttatccgagagtatggctgtgatccttattttgcctgcagtgagaagcttctttaccggaaacaggagaaaaagcttcaggaggaatgtgcatcactattagaaatatgaatgatcccttaacgaatacttatgactgaaaggggcctgatatcttgacaggagggcttgtgaggtgatacggtaacggtgtcgaaaacaaaaatcaaataaccgaatgatgaggtgtgagaacatgcaggaattaaaaccaatcaaagaaggtaaagtacgtgagatctatgacaatggagacagtctgatcatggttgcaacagaccgtatcagctgctttgacgtaattctgaataacgaagttacaaagaaaggtgctgtactgacccagatgtccaaattctggtttgacatgactgaggacattcttccgaaccacatgatctctgtagataccaaggatatgccggagtttttccagcaggagaaattcgaaggaaaatccatgatgtgccgtaaactgaacatgcttccgatcgagtgtatcgtacgtggatatatcacaggaagcggctgggcaagctataaggagaacggcactgtatgcggcatcaagcttccggagggactgaaggaatccgacaagctgcctgagccgatctacacaccatctaccaaggctgagatcggtgatcacgatgagaatatttcctttgagcagagtatcgatcatcttgagaaatacttcccaggaaaaggacgcgagtatgcagaaaagcttcgtgacaacaccattgctctttacaaaaaatgtgcagagtatgcactcagcaagggaatcatcattgcagatacaaaattcgagtttggtcttgatgaggacggaaacatggttatcggtgatgagatgctgacaccggacagctcccgtttctggccggcagaaggctatgaaccaggacatggtcagccatcctttgacaaacagtttgcacgtgactggctgaaagccaatccggacaacgactggacacttccgcaggagatcgttgacaagactattgagaaatatctccaggcatacaaaatgcttacaggaaaagaactggcctgaaaaataacagcagctctgaaatagaatataccttacaagccgcttcggatgcccattccgaggcggcttctttctgtataaaacaggacaaaaacaaaacggttgcaagaaaacggagggatatttataataaatacagaaaccagatgatcctgacagatttaaaggagtgtgattatgagcaggaaaaacaaggtgaaaaagaaaaaaacagttggagatcatattctgacgatcgttctgatcgtggcaatctgtattttctgttatgcagcttttaacctttatcatatttatacagaatataaaaaaggaaccgatgaatataacagcatttccgaaatggcagtgacagaacgtgatccggaccaggtggaagagatagatcagccggatgaacagcctgtagcacctgtgagcattgattttgattctctcaggagtatcaatgaggatgtgatcggctggatctatatggaagcattgcctgagatcagttatccggtggtacagggagaggataataatttttatctgcaccagacatatgagaaaaattataattttgcgggaacgatctttattgattatgagaacaaaagagatttcagcgattgtaataccctggtgtacggacacaacatgaagaatggttccatgtttggaatgctgaaaaagtacagagcggatgagacgctttataataccagcaaatatttctggatcctcacaccggaaaaagattaccggtatgagatcattgcagcgtatacgacttctgtaaacagcgatacgtataccttatttaaaggacctggcaaagagtttctggaatatgagaaaaaaatgttccagaattcggagatcagaacagatgccactgcaagtgaagccaatgtgaaggataagatcgttacattatcaacctgtaccggcaatcaggcaacacgttttgtggtacagggaaaaagagtgaatgcggtgaacccacagtagagcttttgcggataagtttgggaggaaatgatatgggaaatgagatagaaaaattacaaaagatcattgatgagagcagaaatattgtatttttcggcggcgcaggtgtttcaacagaaagcgggatcccggattttcgaagccaggacggactgtataaccagaaatatgattacccgccggagacgatcttaagccatacattttttatgcgaaaacctgaggaattctttaaattttacagagataagatgctttgtgatactgcaaaaccgaatgcggcacatcttaagctggcggagatggagcaaacaggaaagctgaaggctgtgatcactcagaatatcgataatcttcaccagatggcaggaagtaaaaaggtcctggagctccacggaagcgtttaccgaaatcattgtatgaaatgcgggaaattctatgattttaaatatatgaaggaatcgaaaggtgttccgcggtgtagctgcggcggcatgatcaagccggatgtggtcctttatgaggaagggctggatgactatacgatccaggaatcagtaagagtgatctcggaggcggaggtgctgatcattgggggaacttctctggcggtatatccggcagcaggcctgatcgattatttccggggaaatcatctggtggtgatcaataaggcaccgacaccgagggataaatatgcggatcttcttattaaagaaccgatcgggcaggtgttttctcagataagagtctgaaaatatgggaacctgggatgatctgcaaattaaaaatgaggagtatcaaatgggattaaattatgaagttggagatattgtcacactgaagaaggctcatccctgtggcagtaaagaatgggaaatccttcgcgtaggagcggatttccgcctgaaatgcaagggctgcggacatcagatcatggtggcacgtaagctggttgagaaaaatacacgagatttgaaaaaaattgaaaaaaattaaatttatgctttacatcacgggagagatgtgctagaatcaacaatcgtgatatatttcatatccttgctctttgacaggcaaagggccaaaagaccataaggaggttaagacaagcatgaacaagtacgagttagcattagttgtgagcgctaagcttgaggacgaagcacgtgacgctgtagttgagaaagcaaaaggctacatcacacgttacaacggcgtgatcacagaagttgaagaatggggtaagaagaaattagcttacgagattcagaaaatgcatgaaggcttctactattttattcagtttgaagcagattctcagtgcccggcggagatcgagagacatgtccgcatcatggacaatgtattaagatacctggttgtcaagaaagaggcataatttttgcagcggatttttgaaaacaccattaagaacctgttcagttaagtgaaatcataagagaggtagaacgatgaacaaagtaatattaatgggacgcttgacaagagatcctgaggtaagatattccgcaggagaaaatgccctggcaatcgccagatatacactggcagttgatcgcagattccgtcgtgacggagaggcaagtgctgattttatcagctgtgtttctttcggacgtacagcagaatttgcggaaaagtatttcagacagggactgaaaattgcagttacgggacgtatccagacaggaagctatacgaaccgtgagggacagaaggtttatacgacagaggttgttgttgaggatcaggaatttgctgagagcaaagcatcaagcgacagctatgcagcagctcatccgagaacagaggcagcacctgcaacgtctatgccgagtccgagcgcagcaagcgccgacggcttcatgaacattccagatggaattgatgaggagctgccgttcaattagaacatctgatcaagacagatgagacgaataagataggaggaaacaatcatggcttacaatagaggcgagagaccagattctccgatgaagagaagaggcggacgcagaagaaaaaaagtttgtgtattctgcggtaaagagaataacgagatcgattacaaggatgtagcaaagttaagaaagtatgtttccgagagaggtaaaattctcccgagaagaattacaggtaactgtgcgaaacatcagagagcactgacagttgctgttaagagagcacgtcatatgtccctgatgccatacgttcaggactaattctgatcttatacggggtcgttgcgaaacagatgagcagtcatctggaggcagcggccctgttttttttatgagcaaaacagattttatcattgctatggaattataatctcatctttgacagttgattagttaaaaaagtgccacaatccctgtaaatacaaggggtgtggcactttttcttgcatacacgaaatatagtaatgttttatcttcgtttactttttttctgaattcctttcatttttcgttttgttatgaattgatagtcagttctgaatccacaggtttcatggagatcatcggtgagtccctggcgttcatataccggcatgaaaccctgttcttctacatctgcaaattttatctcctttaaagtatgaagtaattgttctgtagtataagttccttttagggcacggtttaataaccgaaaatgtaacaaagcaagaaaacaggtaaggaaatgggctttgatccggtcttcacggtttaagtaaacgggtctggcttcaaagtctgttttcatagttctgaaacaatcttcaatctgccatctcccttcgctgactttcaagatatctgcaacgtcatcatcaagcaggtctgtacataccgcataaagaccatcatacatttcttcttcagcaatcttatccgtatcgagataatagtggattttagctttttctccttcagcggttacagctaccttatttacaaatcttgcaggatcatttggatttttacgttgtttttttagagagccatttgcaaccattttttctgcccgacaaatctgctctgcacggatagctttctgataagcggcatatttaggggagtaggttatgatcaatctttgatccagtttttttgtcgtaaacggttcatctttataataaagttggttcttatcatcatctgtcagttttttgagatcaacaggtttatcatctgcgagacatttgaatccagttttgtttaaagcccatgtccggtcttcaacaggcagttttttgatggactgagtgacgatgaatgcccgttgtcccatgtgattaaggacacggttatcttcagaagcaagtccggcatcactgcaatatataaacttatcacagccgaattgctggagaatctttgtttctaaaggttttaaggatttctgctcattttgatttccgggaaagagcgagaaagccagtgggatcccgtcaccatctgtaaaaagtcccatttgaataatgggattcggacggtgctccttgctttttccgtattttttatcgccatcttcctgttcaatttcaaagtagtagtttgtgcaatcataataaagaatccgatccattctgtcgccgagaaaaaagctgtttttataaacttctgattgaataaaatccatttcaaaagcaagaacagaaagggctcggtacacatcatgaagttcgtaagtaggaggttcaaggaactgttttgcagtttggaaggaagaacttttgctggaaggttccagaacccttgtataaattaaatcagacaaaatcgcattaagatcatactcgaatttatacctgcttttgatttttcggcagatagaatcaagtttcagaccatagtaaatcgattgaagaaaaagatatccaccagagaaaagtttctgcttattatagtccaggagtctgttggaatgaaaagggatcatgacagtagcatcctctttttcgcttttatacttcagtgtttcaagacgagcctgttcattcgcccattcaacaactccgtcacgatctgtatggagctgttctgataattcagctaacgtacctagctttcggatggtttttgaagtactttttccttcggcatttgtataggactgagtgatataaaaggactcggaattttttgattttgatgttgttatgcgcacaataatcacctctgtcactattataccatatatcactaaatattactatataataaaaataaaaatttgacaaaaaaataagcctatttcaaggctttgcagtactttttttgatttcaatgtgtcaaactcccgagatgagcagtcatctggaggcagcggccctgttttttttatgagcaaaacagattttatcattgctatggaattataataaggaatctggtataatgttaaataacttatgggttaaattacattaagaacaggaaaaagcaatgaacaacaaagttaaattcaaggggcctatgaaacacttcatgcgctggccgctgtacctttcggtcctggtcgtgctgctggacctgctggtgtttattgtaagtgtaaaggccggaattctggtgtctgtaggtactgtgatctatatttttatcgcagtacagctttttcgatatcacaaaccgctgatcatcaatgatatgatcgcatttgccaatcagtatgatgtggtagaaaagcggatgctggaagaactggcgcttccttatgccattatggatatggaaggccgcatgatctggtccaaccgtattttttcagagatcacggggagagatcagttttataaaaaaaatatcagcacagttttcccggatattactccggacaagcttcctgtagccgatgaaccggaaatttctgagatgagtatacatttcggggatcggatctatcgggtttccatgcagcgggtgactatgggtgaagtagtcagccatgcggatattctggagaatatgtcccagaatgtcagtctgatcgccatgtatctttatgatgaaacagagcttaaggaatacatccagaaaaatgaggataacaagcttgttgtagcactggcttatctggataattatgaagaagcactggagagcgtggaggatgtgagaagatctctgcttatcgcactgatcgaccgaaagatcaccaagtatttttccaactttgacggccttgtgaagaaactggagaaagataaatatcttctgatcatgcgccagagttcactggaaacactgaaggaacagcgttttcatatcctggatgaggttaagacggttaacatcggaaatgaaatggctgtgacattaagtatcggaatcggtctgaatgcttctacgtatatccagaattacgaatatgccagaattgccattgagatggcactgggccgtggcggtgatcaggtagtgatcaaaaatgaaaataatattacctacattggcggcaaggcacagcagatggagaaatcaacccgagtgaaggcacgagtgaaggctcaggctctgaaggaatttatgagcaccaaggatcgagtggtggttatgggacacaagatcacagatgtggatgctctgggagctgggatcggtatttaccgtgccggtaagactcttggtaagccggtgcatattgtgatcaatgatccgaccacatccattcggccgctgatgagtggatttatggagaatccggattatgagccgtccatgtttgtggacagtaatcaggccaaagaactggtggataacaatacggtagtaattgtggtggataccaacaagccaagctataccgaatgccaggatcttctctatatgacaaagaccattgtggtattggatcatcaccgccgcggcagcgaggtgatccagaatgcagttctgtcctatgtggagccatatgcatcctcaagctgcgagatgatcgcagagatcctgcagtattttgcagacgggctgaagcttcgcagtattgaggcggactgtatttatgcgggtatcatgattgataccaacaactttacaacaagagcgggtgtgcgtacctttgaggcagcagcattcctgcgcagatgcggagcagatgtgacacgtgtacgtaagatgctccgggataatattgattcctataaggcgagagcggaggcagttcgtactgcggagatctacagagattattttgccattgcaagatgtccgagtgaaggtctggaaagtcctaccgttgtaggagcacaggcggccaatgagctgctcaatatcgcaggagtcaaggcatcttttgttcttaccagctataataatgaggtttacatcagtgccagagccattgatgaagtgaatgtacaggtcatgatggaacggatgggcggcggcggacatctgaatattgccggtgcacaggtgaaagacaccatggatgagaccgaaagaatgctgaaagaaattatagaccagttatatcaggaaggggacaaatagaaatgaaagtaattcttctggaagatgttaaatccctgggtaaaaagggacagatcgtaaatgtaagtgacggatatgcaagaaacatgatcctgccaaaaaagcttggtgttgaagctacatccaagaatctcaatgacctgaaactccgtaaggcaaatgaagaaaaggttgcacaggaaaatctggacgctgccaaggcatttgcagaggagctttccacaaaggaggttatccttactctgaaggtaggtgaaggcggaagaacattcggttctgtatcctcaaaagaaatctcagaggcagccaaaaaacaactgaatcttgatatcgataagaaaaagctccagatggagaatccgatccgtaacctgggtgttaccaatgttccggtacgacttcatccgaaggtaaccggaagtctcaaagtctgggtaaaagaggcgtaatcaatggaagaagcactgatcaagaggattctgcctcacagcattgaggcagagcagtcagtgatcggatccatgatcctggatcgtgatgcgatcctggtggcttccgagatcctgaccagtgatgatttttatcaaaaacaatacggcatcatttttgatgccatggtggagctctgtaatgaaggacagccggtagatctgatcactctgcagaatcgtctcaaggagaaagagcttccgccggacatcagcagtatggaatatgtccgtgatctgatcgcagcagttcctacatcagccaatgtgaaatactatgccaatatcgtaagcgaaaaggcagttctccgtcggctgatacggactacggaagaagttgccaatgcctgttatctggaaaaggacagtacggaaaccatacttgaggaatccgagaaaaagctgtttaatattttgcagagaacaaatggcagcgattatgtgccgatccagcaggttgtgttgaatgcagtcagcaatattgagaaggcttccaagctgaagggctccgttaccgggattccgaccggatttgtggatctggattataagacttccggtatgcacgcatccgatcttgtactgatcgcagctcgaccttccatgggaaaaactgcctttgtattgaatattgcccagtatatggcgtttcgtaaagatgtgaccgtggctattttcagtctggagatgtccaaggagcagctggtaaaccgtcttcttgctatggaatctcacgtggattcccagaatctccgtaccggaaatctgaaagatgaggactggacgaagctggtagaaggagcggatattatcggtggctccaatcttattattgatgatacacctggaatctccattgcggagcttcgttccaaatgcagaaaatataagcttgagcataatctggggatcatcatgatcgattatcttcagctgatgagcggaagtggaaaatcggattccagacagcaggaaatttcagatatttcacgatcgctgaaagcgttggcaagagagatcgatgtaccggtaattgcgttatcacagcttagccgtgcagtggaacagagaccggatcacaggccgatgctttcggatcttcgagagtccggagctattgagcaggatgcggatgtggtcatgtttatctatcgagatgattattatcacaaagataccgagaagaaagacattgcggaaattatcatagccaagcagagaaacggcccgatcggaactgtggagctggtatggctgccgagatatacccagtttgtaaatatgaaaaaatagagccgtgcagacggtaaatgaaaggctgtcaggatgaaagcttatagttatcctgatggccttttgtatttttgtctgtgtgatcgtggagttcgggatgctatggatataggcaaagagtcatatttggtaaaattatgtcaaccgattattcttgctatttcctgatctcaggggttatactgtagacagcagcagtgaatctctatataagggggcgttcacaatggaaaaaagatatacagtcagacaggccgtaacactgaccggagtgaaatcttatgtcctgcgttactgggaggaagaactggagcttcggatcggacgcaatgaactgggacatcgctattatacaccgtttgatatccagctttttcttaaaataaatgagctgaaaagtaaaggacttcagttgaaagcaatccgtacactgatcccaccggaggcaagaaaggcagatacaccggatttttcagaatctggtatcaggatcctggatggagaagctgttgagcttgaagatatcccaatgaaaaaaacgggatctgaaaaggagttcatggaaaaaacggaatccgggaatacagagaagtgcgaggcagataatgataagatactggagtttcaggaaatcatggaacgcctgatccgtgaggaaatgcagagaaagaaagaaggagagtaccggtgtcgttctctggatgaagcgatccgcaggcagcagcaggcaagaagagaagcggcagcttcctgtgagggaaaaaagaataaaaaaaacagaaaaggctgccggtaaaccggcagcctcattcattatagcagcttatcaagctaatgatgcattactcagcagagatagcaccaactggacaggcctcagcgcatgttccgcagtcaacacaagcgtctgcgtcgattacataatgctcgtctccctgagaaatagcttcgttcgggcactcaccctcacatgttccacagctaacgcattcgtcagaaattacatatgccataattgatatcctccttttaaattgtgtattatatgtatcccataccagggattctattcccattctaatatatctgcataaagaatacaagtataaatttataaacaaaactgaaaattcgtaacccgttgattccattccggattcgtattataatagcagaacggaatgaaaatatttcgataaaacagtaaaggagaatacaatcatggcaaaagttacaaagagcatgctgatcggagaactgctcactgtagacccgaatatcgcaccgatcctgatgagagcaggaatgcattgtcttggctgcccgtcttcacagatggaatctctggaagaagcagcaatggtccatggcctggacgcagatgtcctcgtagctcagatcaatgattttcttggtgagtaataaacagaagcttttttgctgaaacaaaaggaccgctgtcgggaaatgcagatcatatggatcgcattccgacagcggtttgtttgtctgtaggatatttggtttgtcagatattcagaagcttctgaagtgcatgatcagcgatcagtgcacagtgctctctgaggtaggcttcaccggctggtgtgaatgcgcggccgatgccatactcggaaaggatattgcagaccttgttaaattcttctggtgtacagtctgactgatgaagtaccagctgatagacaccgtcttctccttcacgatagagagtattatcaccggtaaagaaaccattcataccatgagatgcggcaataacatcatccagccccgggaaagagtacaggcgtataagctttacagaactctcagccggctgctgtgatgcatccggagtttctgttgcctgagaggcggaagtttccgcccttttttcttccggtttctgtgaaagatccttaagcttggattcacagagcttctggaagatatcgatgatattgtcagcgccatcgatctctacggtatcggaaggtttgttgcccttgaagggtgcaaatttggaaaaacgtgtatccagttcttcaggatcttccactttagtgataatgaggataatactttcggcattgacaggaatagcctcgatcatcagaggaatattatctgcttcaaaaccaaattgtatctgtgcctgctgcatcatatcacgaaagagacgtttggctttttcggtaccgtatgcaagttcgctgatacggatctgatgactgtccagatcttctttcgtcagggtacagcggatctgattttcattgattttttctattttcatatgatcacatcctataggtaaataaatttaatcttttacatactgtattatataacagttatacacaagatgtaaagatgtagaaaccggagaaaaaagaaaatttctgattcttttataaaagacttgcatctgaagggaaatcaggtataatgaaaagcagaaaagctgtctcctcccggaagcaagaagacagtaacgataacttaaagtcatatttttctgaagataaggattctgtgtgaaattcatcggcgagtctgtcggtacacagagaaatttccccccattttattatttatattttattacaagtatcatcctaacagggaaggtgcagcttttcgagaaccattgctggtgttttctgaaaatctaaccaggaaaggaggtcgggatacgccaaatatatcacaggaaaaaaagaaatccgcaaaaccccttcgaagggaactggagctttatcgtgagaacggagtttctctttatctcaatggagcaccaagcactccgaaaaaaatcgcaaaagcctgtcagattgcggaaaacggggtctatatgcgggattatacggaagatgaagacggccatatcgcctgtgtaagctttgatcttattcgcaaagaatgaccgtacataagaaaaaacggttccccgaataacgatcatcccctgcactcatgcataccatgcggggaaccgaaattctaaagaaattgtgaaaaattattaaaagtcgatttttataacgaaatgtagacaagatatgttataataaagcaaattatgacattttataccgaaaggaaaaaaacatgataaaaaaacacataccggtccttgtggtaggtctgctgatcgttctggtcgctcttgccggagggactgtttacgggatcaataagcttataccaagcaggaaacaaatggatctgacagaatactacggccagaatgcagacggtgaggctgcgttgatacttggaactgagaaactggaagagaaggcacttatctcaggagaagatgtatatcttccgctggatgtagtgaacggatatttgaatcagagatattactgggatagcgaaaacaagaagatactgtatgcaacaccatccagtctcacagaggaaccggctttagataaggcagacggaaacgtgtggctgaaggatgacacggtttatctgaaactggattatgtaaaaaagtatacagatatcgattcttatatagagcaggatcctgcaaggattgcgatacagtacaaatttaccaatgtggagaccgtgaccacgaagaaagataccgtgatccgttaccggggcgggatcaaggcgccgatcctttccaaactggcgaagaatacagttctccggctgatgaatgaaggagaggactgggatcaggtggcaaccgatgacggttacatcggttatgttcagaagaaaaaagtaagtgctgtggatacaacggattatgaaagggattttaaaacagagtcctatacatatcttaccatggatgaaccggtgaacctggcatggcaccaggttaccagcacagatgcaaacagctatttcgcagatgcggtacagaatatgacaggcgtgaatgtgatctctccaacctggttttctgtaacagataactccggaaatatttcaagtcttgcatctggggagtatgtgatgcaggcacatgaaaaaggactgaaggtatggggactggtggataattttaatgagaacatgaataccaaagaagttctttcaaaaaccagttcaaggcagaatctggagaatcggctgatcacttatgcactgaaagtaggaatggatggaatcaatgttgattttgaatctttgagcgaaggagtaggaatccatttccttcagtttttaagagagctttctatccagtgtcacgccaataatttggtactgtctgtagataatccggttccggaagattttaccagtcattatgaccgtgcggagcagggcaaggttgtggattatgtgatcattatgggctatgatgagcattacgtaggctccgatgccggttctgtggcatctctgccatgggtagaacagggggttaaggatacgctttcagaagtagcggctcaacggacgatccttgcgattccgttctacacaaggctctggaagactacagatggcggtgcactgacaagtgaggccatcggtatggatcaggcacagcagacgatcagtgataacggagcagaaacatactgggacaagaagacaagtcagaattatggaacctatgaaggggaaggtgccacatatcagatctggctggaggactctaagtctattgcggaaaaggttaaactgatcaaaaaatacaaactggcaggtgtggcagagtggaagcttggattcgagaacagcgggatctggagcgtgatcacagaaaacctgtcataaacagaagaaaacattgtgatcttcacaatgctaaaaacactcccggcaacatatattaaaataaatatgccgggggtgttttgtgttgaaaaaacatttcatagaattggcaatggcagttcttatgctggtctgtttttatattctgtcatgggaagcggcagaaactgcaggcagacttatagatgtatccggaaatataaaagcagatcaggtgatcctggtggatgccggtcatggcggtgtggattccggaatggtgggaatcggtggactgaaggaaaaagggatcaatctggatattgccatgaagctaaaaacgatcctgaaaaaaaaaggccttgccgtagtaatgacccgggaagaagataaaggtctttatgaaaatggtacaaaaaatatgaaagcacaggatctgcagaatcgtattgaacagatccggaaatatgaaccggtgctttctgtgagtatccaccagaacagctacagtgatcccggagtaaaaggtccgcaagtattttattatgaggattcggaaggcggaaaagaactggcactagcgatccaggaaaacatgaaccggaagctttccattgcacggccgcgggtggcaaaagaaaacagaacctattatcttctgaagagaagtccgggtgtgatcaatatcgtagaatgtggatttcttacaaatccggaggaagccgccctgcttcagacagagaagtatcagagaaaggtagcagaggctgtggctgatggaatcgttacatatctgaaaaaacagaaggaaaacgaaaataattgaaaaaaatgtgaatagccttttcataggaaggtgattctgctatactttacgtgaattaaggagaatcctatgcttggaatcatttatcttatattatgcatgttaacaggaatggaaacggcaggatgtctgtttccgcgtcaaacgactgaaagaggaaacaggatatgggtggtcctgccggcagcgtttgggatgggaatcctgatgctgacctgggcagtctatattctttcctggatgttcagcgtatgcgcgggggcagagcatcctcttttttatggaaatctgatcgtatttctggtagatatcctgctgctttcgggaatcttccggtggaaaaagaaaaaacagcaaaaaatgtttgtgatatctgaacggatgatcagcagaaaatggatcctgaaaaaagagcttctgctttttggcattttgacggtttttgtgacctggatgatgttttacgttttccatatgaaagacggcattctgtactccggcttttcggtatacggagattatgcaccccacacggcaatgatgcgatctttttcaaggggaaataattttcctacccagtatccgcattatggcgggcaggatgtgaaatatcattttatgttccagttccttgtgggaaatttggagtatctgggccttcgtcttgatctgggatataatctggtaagcatcctgtctctggcgggatttcttatggtgctttacgggatcagctaccggatgttcaaaagcttctgggcaggggcagctgccattgttttcttttttttccgcagcggaacagcgttctggcgttatctgtgggaacatcttcaggcgggggaccttgtacggactctggaagaaaatacggcatttatcggttatactactaatgaaaactggggattatggaatttcaatgtatatctgaaccagcgtcatctggctttcggccttctgatggcagctgtagcggtatggacctttatggattgggtggaagccggatgcagtcacaaggagcagggctttttgtgggtccgtaatcgtttttttacaaaaaaagcctggatctgcagaaatgtggatacggcgatccttctgggactgtttctgggattaactgctttctggaacggagctgcgctgatcggcggccttctgatccttgccggactggcagtgttttctgacggtaagctggattatgtgatctgtgccggactggcagtgcttttttcggaactgcagtcgaagatctttgtgtcgggaagtgttatgagtccatccttttactggggctttctggcagacaataaaagcatttccggtgtactctggtatctggtggagatcagtggatttttctttgtgggaatgatcgtggcagcagtatttctgaagagaggtcagcgggtagtgctgatgggctgtttgcttccaatggcatttgcatttctggtatctctgactccggacatcaatgtcaatcataaatatgtgatgatttcctatgcctttgtgacagttttctggggctggatcgtaagatgtgttttccttgcagtgaaaaacagctggaagaaatgggccggtcgcgcagcgggagcggtcctttgtatctgtcttagtgcaacggggatctatgattacgtgatcatcttaagagacaacgattccgcacacaggatgactgtaaatatggaaagcagcctgacggactggctcagtgcaaatcttaagaaaaatgatcttctgctgacaccggaatataccatgaacgaggtcaccatgtccggtgccatgctgtattgcggatggccttattatgcatggtctgcagggtacgatacgggctatcgtgccggccaggcagtgctcatgtataccacggatgatccggagctactgaaagctaccgtaaaacaggaaaagatcacatatatcctgtttgaggaggatatggaatttgaacagcaggaatgtcgtgaggatatcatcagggagacatatccactggtgtatacctcagaggatgggagaataagaatctatgaaacatgacagcttatatatcattatgccggcatataatgaagaaaaaaatatcgggaccgtgatcgagcaatggtatccggtagtggagaggatcggcggggacagccgcctggtgatcctgaatgatggcagcaaagatgcgacctacaaaaaaatacagaattatcagaaaaatcatgaccgtcttatcggaatcgataaaccgaatgaaggacatggaggaacaatccttcggggatatcgttacgcagtagaaaaaggtgccgattatatttttcagacggattcagacggccagacacttccggaggaattctggcagttttgggaaaaacgcaaaaagtgcgggcttcttatcggttaccggcagaagagagaggacgggctttccaggatttttgtgacaagaatactgcggcttgtgcttttccttatttttggaacctgggtaaaagatgcaaatacgccatatcggctgatggatggaaaacagctcgccaaagtactgaagcgtatcccaggcggatttttcctttccaatgtgctgatgacagtgatctatgaaaaacatcatctttatgtggaatatatccccatcacattccgaccgagacaggccggaaaaaattctatcaacatgaaacgtatcataaagatcggaagacaggcatttgcggactttatccgtctgcggggcaggatctgatacaggagggacagaaggatgaaaaaaaagatcagagaattatttccggagctgactgcagcagtgctcctgacagtactttctgcgtatctcctgggaggagatgtatggacattctggacctggtggctgcttgcactgttcatgggaatggtggcaatgccggtcacaggaaggctttttggtggttttgaagaccggggctggcttttttcaaaggtacttgccattgcagttaccggatttctcacctggattctggtagcggtggaaatccttccttttacagctgcagtgtgtgtaggggtatctgtggctgttggcattttatgtgctgtactttttcatgttcagctgaagcatggcattgaatgttatccgtcaggaaagatgcagctgatctttcgggaggagcttctgttttttgggatctttctgctgtggacttatctggcaggattccggccacaggcatatggaacagagaaatttatggattatggcttcatggaggccatgatgcggagcaaaactcttcctgcacgtgatctctggtattcacagggaaccatcaattattactatggcgggcagtattttgcagtgtttcttacgaagcttacaggaagcagagtggaagtgacttataatctgatgcgtacctttgtggcagcgtttgcctttgtgtatccgttttccctggtccgtcagatgacgaaggacaggctgtatggacgactggatggaaagaagaaatatattccttcactggcaggagttactgcaggcattgcagtatctatcgcgggaaatgtacattatatcgtctaccgttgtgtactgccgctgatccggaagatacagggagtggcagaaacagccagctactggttcccggatgcaactcgttacatagggtataatccggtgaatgacagtgataagaccatacatgaattcccatgctattcctttgttctgggagatcttcatgcccatgtggtaaatgtgatgtttgtgacatttctggtgggaatgctctatgcatggctgaaaatgatccgaaaaagagggcctgagcctgaaaaacaggaacgcagtgttttctggctgagacagcttttgatgccgcatatccttttggcgtccgtttttcttggcatgttccagtggaccaattactgggattttgtgatctattttgtagtgaccggtggagttgtcctgatcgcaaatatcatacgatttgagggaaagataatcaggatcctggcagtgacgatcgtacaggcagtggagatcataggtctctcttatctggtgatcctgccctttacattgaaatttgatacgatggtacagggggtggcactggcacagcatcattcactgtggtatcagcttctgatcctctggggacttccggtgctccttactgttttgctgatcctgtctgtcatcacagaaaaaatgaggggactgaagcataaaagtctttacaggctgctggaggcgatcacagttccggatctttttgcagtgatcatgggcttatgtgctatcggactggttttgatcccggagcttgtatatgtgcgggatatttatgaaaatggaaatgccagagccaatactatgttcaagctgacgtatcaggcatatatccttttcggaatgacaatgggatatgggatttaccgtatgctggtgatatccagacagaagatcatccggatcctttcaggtgtggggctttttgtactgctctggaccgtgggctatttcggaaatgccgtgcattcctggtttggggatgtctggaaggtttcggagtatcaaggactggatgcaactacatttcttgagcaggattttcctcaggatgcgtcggcaatccgctggctgaagcagaatatcaagggctctcctgtggtgctcgaggctaacggggacagctataccggatatgagagagtttctgcatctacggggcttccgaccgtactgggatggtatgtgcatgaatggctctggagaaataatgtacctgacctcaatgaaaaaagtgcggacatccagactatttatacatctacagatgcagagacggtaaaaaaactgatcagccgttatgatatttcctatatctttataggaggacaggaaaaagaaaaatacggaacagagcttaatgacagtgttcttcagagtctgggaagcattgtctttgaagatgatatgtcaggaacctacattgtgaaagtggagcaggattgacattttttccataataacgctataatgtaactattatgtagctatctgttaacggatatgctcagcaggagatttctgctgagcagtatacagaaaaaagtgacagttgcaggatggcagcagaaaggaggatattatgaacagaatcgacagactttatatggaaatgatccattattatcagggggatccgaagcatatccagcattttgtgaaggtgcatgatctttcaaggctgatcggccagagtgagggtctggatgaagatacgatgtatgttctggaagctgcggctctcgttcatgatatcgggatcaaagtcggtatggaaaaatacggacgctctgatggaaagacgcaggaagcagaaggtccggcagctgccagagagatgcttaccgcactgggctttcaggagagggtgatccgcagagtggaatatctggtaggacatcatcatacctataaggatattgacgggctggattatcagatccttgtggaagctgattttctggttaattattttgaagatggactggataaagaacatataaagaaaagtgcagagaagatctttaaaacagaaacaggtaaaaaaatagtaaaagacatgtttttcccggagacttttcagaaatccgaaacctgggcacaggatgcccttcaggatctggaagattttattgaagagcaggggatttatatcagacagtaaatggagcgtaaaatgaaagcagaaatagcagttatgacagaggagaatatagacagaaaggcaattgccagaggtggcgagatcctgaaaaacggcgggcttgtggcatttcccacagagactgtatatggccttggaggaaatgccctggatccgaaagcatcgatgaagatctatgcagccaagggaagaccttcggacaatccgctgatcgtacatatcgcagatatccgtgacctggataagatcgttacggaggttcctgaaaaagccagaatactggctgagaaatactggccgggtccgctgacaatgatccttcccaaggcagatatcgtgccaaaggaaacaaccggaggactggacagtgtggcagtacgttttccaagtgatcgtatcgcacaggagctgatccttgcagctggcggatatgtggcagcgccaagtgccaatacttccggaagaccaagtcctacgacagcaggacatgtggcagaggatctgggagaagccattgatatgatcattgatggaggacaggtaaatatcggtctggaatctacgatcgtagattttacagaagacataccggtagtcctgcggccgggatatatttccctggaaatgctccgggaaacacttggagatgtaaggatggataaggggctgatcaaaccggacagcaaggtccatccaaaagcaccgggaatgaaataccgtcattatgcaccaaaggcagatcttgccattgtggaggggtccacagagggtgtgatcgcggagattgaaaaaagagccggagaggctgaggagaagggactgactgtggggatcatcgcaacagatgaaacaaaaggccgatattcacatggaatcgtaaagagtatcggaagccgggagcaggaagaaaccatcgcgcatcatctgtacgaggtcctgcgtgattttgacagctgtaatgtaagtgccatttattcagaggcattttttacaccaagaatgggacaggcgatcatgaaccgcttactgaaagcggctggtcataaaattatcaacgttgaggaggagaaagaaaatgatagcactgggatgtgatcatggcggctatgagctgatgcaggaggtaaagaagcatctggaagagagaggactggagtacaaagattttggatgcaatggtccggaatctgtagactatcctgtttatggaaagaaagtagcacaggcgatcgtggacggtgagtgtgagaaaggaatcctgatctgcggaacaggtatcggaatttccatcactgctaataaattcaagggaatccgtgctgcactttgtacagattgctttactgcagaggcaacaagacttcataacgatgccaacattctggccatgggcggtcgtgtagtaggaccgggacttgctctgaagatcgtggatacattcctggatacaccattttccggggatgagcgtcatatcagaagaatcaacatgatcgaggattgatcgatcagtaagaaaccaatagaaaaagaggattctgtatggataaaaaaggacagaaacgacagggatatctttcctgggatgagtattttatgggtgttgccatgctttccggcatgcgttccaaggatccgcattcacaggttggtgcctgtatcgtaagtgaagataacaagatcctgtcaatgggatacaatggatttccaaagggatgttccgatgatgagtttccctggggaagagaaggagatccgctggataccaaatatctttatgtgacacacagtgagctcaatgccatcctgaactaccgaggaggaagtctggaaggtgccaagctttatgtgtccctgtttccctgcaacgaatgtgccaaggctattatccaggcagggatcaggactatcgtatacgactgtgataaatatgcagatactccgtcggtgatcgcatccaaaaaaatgctggatgcagccggagtccggtattataaatataaccggacagaccgtgagatcaccattaaagtgtaaaagagaacaaaaataagagaaaaacagcagcctggctcctgattcatcatatcatcagggcttccgctgctgttttttatgaatggttaagaatgtgcttcggaatgaggatcttccggtgcggataagactgtgggagagatcttcagtggaaaacttaagcagactttgaaaaggtcaccgtccagataaagtttaaaggtgccaccttgaagctgggtaaggctctgtgcgatggataatccaagtccgctgccttctgtatttctggcaacatcgccgcggatgaaacgttcggtcagttcttcagccggaatgttcagaggctgtgcggaaatatttttcagggtaaagatgacttgatctttttccagaagaacttctgcatagactcttgtgttctccatggcatatttcagaatattgccgaaaagattttcaaggatacgccacatccgtctgccatcggcatagatcatggcaggaaaatcaggcagatgtgtcatcagggtcagatgtctgcttttcatccgttcttcgaattcacccatcacctggtaaagcatttccacaaagttcagttccgtcatttccagagaaagatttccggtactggctttggaagcttccactacatcttcggtcagacttttcagacgatgtgcctttgagtccaggatctcaagatatttcagtgcttccggatctttgaggttcagccttttcagcagatcaatgtaattgatgatggaagtcagtggcgttttcagatcatgggagacattagtgatcaattcggttttcatacgctcatctttgaggcttttttccacggcagcgtccagcccgtcaccaatgcggttgatatactgtgccattgctttctgatcaccacggagttccttttccgggatcttgtaagtgagctctccatcggtgatccgttttaggccatcaaggaggagttcccgtccaagagcaattttgtagacgcagaaaagcgcacccagatccagaaggaatagaagcaaaaacatcaggaaccatccatcagatgccgcgagcagggcactgaagaaaaattcaaggaatagaaatacgccaagtcccactaccatacgtattctgctgatggtattcctggagaaaaaatcgatcagcttaccggctttacaaagacacagacggggaagcttcaggcatttgcgaagcaggctgtttttccacagggtgcgagctttgatcctgcggatcaggcttaaatagccgatccagaacaggcacgtgatcaggaaaatcgtgatacccaggatgatcagggaggagacaaggttataggtgcaagcttgcatgctcagtcctgcggtcaatacaccaagtgccgggatacacacaagtcctgctgctgcttccgtatagatcctgtcaaaaaagttcagttctggctgaacagtgtctgtattaccgctatcggaatttcttcttccggtgtggacagtaagccagataaaatctatgataaagagcagaaaactgatcatggtgatcacagcagccgggataaataaagtacggtaagtcaggaaatgctgtctgtcagttttaatggaatcctgtacaggaaggctggtatcatcgatccaggcaagaaaactgcagttttcatcgtatgtggaatttcgaaggagatcgatccagtttcctacagaagggtttgcagcagcagaaagattcagattcataagaccattccgggcatttttttcatctgtggcagcttcgttgacacttaggaacacgtaaggctttttgtctgaaaaaccggaaatatcagtcaggtcggaagtataggctgcatctgtatttgtgaagattttctgtgaggtgttatccgtataggcataatggatattggaattatcactgctgtactcatccagtgtctgagcagcttctgtccagctggaaaaaagatcccgggcattatccagctgctcaaaggcatcgttcaggttccccttgaaattcctggttttggatgaggtggaattcatgtaatccaggagactgtcgtaaccttccggtgcacaggggatttcaaggatcggagtgagcatatttgccacatctgtgtaaaccacgtttccgtttttgtctgtgatgtttttcaaaggttcctgtgactggatgccgccgtctgcatattcggcgctcagagcggaaagaatcctctcagtccagtctttctgggaaattccctcgtgcttcagggcaccggagttggcatttagctgcaggaccccgtcttccagagcctttttgaaatcggaatagtacatatattttgtttcaccctccggggtggtaaggctcaggacgatccagctatcattggaatggatcgtctgtgagctccattccttaagatcattgaaggaataggctagtccggaggtgtttttgaaggagagagaatctccgttataaagctctccgagatcaatgtatgcatcttcgtttgttttatccaggatttctctggctgagattccggacaggattgtggaagcttttgagtaaaagctgtcagcaaaagcagaggtctgtaaataatcctttgttttaagatcttctgcagaatccatccggatacctgcctggatcaccagtgccgctgaaaagaccatgatcagaggcaggataagggcaaggacaagagcaggaatgcgcataaatgaacggtttttttccgtatgtttatttttattcataatacccctttctgaagtacagatacttcatggccggctggctcaccggctcagtttttcgattttataacccaggccccagacaactttcagatagcggggatccctggggttgatttcaatcttttcgcgaatgtgacggacgtggacggctaccgtgttatccgcggccagagcatcttcattccagatgctctcgtagatctgtgtggtggaaaaaacacgtccgggatttttcatgagaagaagcaggatattatattcgatgggcgtcatccgtaccgcttctccatctaccagcacctcttttttgtcatcgtttaccgtaagacctccggttgtgtagatgtgttccgatgctgccggtgcagcggagccaagctgtgtgtaccggcgcagctgggattttaccctggcgatcagctccagaggattgaaaggtttggtgatatagtcatctgcaccgatgttaaggccaaggattttgtctgtgtcttcagattttgcggacaggatgatgatgggcagaggattgctttcccggatcttgactgttgcccggatcccgtcgagacggggcatcatcacatcgatgatcagcagatctacagtttcgctgttcaggatatccagtgcttcctgtccgtcataggctttcagaatgtgatagccttcctgcgtaagatagatttcgatagcttccacgatgtctttgtcgtcatcgcaaacaagtatgttagccacttttttgtacctccctgatgttattagaatagcagccggaaattaagacgaaaggggtaaattcttaagattccatgaaatccattgtactatattaaggatatagtgtaaacagagaaagccttgttggcagcagacgtgatgtgctaaactagtactagataacagaaaataacgatagtggaagaaagatcaggagaaaagtgaaagtggagaatgaaaataaaatcagcagtatggcagggagcgcgcactgtacggaagaaattatgtcagcttgtgctctttgtccaagagaatgcctggcagaccggggtgcagggaaaaaaggcttctgtggcatggatgagagaatttatctggcaagagcggcgcttcatatgtgggaggaaccctgtatctccggaacaaaaggctccggggcagtgttcttttccgggtgcgggctgcgctgctgtttctgccagaatcatgatattgccatcgggagcaggggacgggctgtaagtgtggaacggcttggagagatttttctggaactgaaggaaaaaggagctgcaaacatcaatctggtaacaggtgcacactatgtaccacagatcatagaggcactggatatggcccggaggaagggtctggatattccggtggtgtataattccagcgggtatgaaaaaacagaaaccttgaagcttctggaaggatatgtggacatttatcttccggatctgaaatatctggatccggagcttgcacagaaattttcttatgcgccggattatgtgcaggctgcaaaggctgcaattagagagatggtgcgtcagaccgggaaatgtgagtttggagaggatggatacatccggaaaggaaccattgtccgtcatctgatcctgccgggacatacaggaaattccataaaggctctgaggtatcttcatgaaacctatggggaagatatttatatcagtattatgaatcagtatacgccggtgagaaaatttgtggaatttaaggaattaaaccggaaagttacaaaaagagagtatgaaaaagttctggatgctgctgtggatatggggattcagaatggatttatccaggaaggagaaactgcttcagaaagctttattccggatttcgattatgagggagtggaaaaaaatactccataaatggaaggaggccggtactttcgtaccggcgcgtatgaaaaagaaaaatattatagaaagttcatcaccttctatggtttataatatacagtaaaaatgtgaagaaagtgtgtctaacatttgaaataaatgtgaaaagaacaatttatgccacaaacatagcaaaatatgacgaaaatttatcagaatttcttccaggtttcacgaaggaaaagaatcaggatcggaaatagctccagtcggccggccagcatatcgaaagaaaggaccagcttggacagcggagaaaagatcccgaagtttcctgtaggaccgatcagggaaagaccgggacctacattgtttaaagtggtgactacggctgtgaaatttgttacaagatcaaattcatcaaaactgatgataaagatagatgcagccacgatcatcagataaacgatcatataaatattggtggcacgcataacttcgtgagacaccgcttttccgtccattttgatcttttttactgcattgggatgcagataaagatgcagttccttgcggacggattttgcaagaagcagaagacgggaaatcttgattccgccgcctgtactgccggcacaggcaccacagaaggtaagcagtaccaggatcgttctggataccgcaggccactggttaaaatccgtagtggcataaccggtggtggtgataatagaaccaacctggaaaaatgcctgttgaagtgcttcccacacattgtcaaacagatgtcggacattgaatgtgatcatcagggcagaagcgatgatcacaaagaagtagcagcggacctcttcagatttcaatgcttgagaaaacttcctggtgagaagaagaaaatagacattgaagtttacgccaaacaggatcataaagatggtgatgacgatctgaatatataagctgtagcttcccatactgtcggatttgattccgaacccaccggttccggcagttccaaatgctgcacagagactgtcgtaaagaggcatccccccaagaagcaggaggatgatcagtgcaacagtgagtgcaatgtagatcttgtacaggatcttggcagttgactggacttttggaagaagctttcctacggaaggaccggggctttctgccttcataaggttcatatgatagccacctgcaagcggaagcagtgtcaggataaataccagaacacccataccaccgatccagtgggaaaaacatctccagatattgatgctgtaaggcatctgtgatggatcggagagaatactggaaccggttgtagtgaaaccggaaacaatctcaaaaaaagcatcaatgggattcgggatagccccgctgagcacaaacggcacagcaccgacaatactgaggacgatccagcttaaagcagtagtcacaaggccttcacgggcgtaaaacgctttcttggacggtttgcggctgaccagtggaacaccgatggccagacatgccagaatcgtgatcaggaaggcaataccggatttttcgcggtagataagggcagtgatgccgggaaccagcatacagacagcctccacattcatgatccatcccaggatataaataataatcgaataattcatttggcagtacctctatttttcaagtatatctgtgatgtcgcgaagccccttgtgagtggttacgatgatcacggtatctcccacctggatcatatcctgaccacggggaatgcggatgcggccgttgcggttcaggcatcccaccagaagattcttgcggagattcagctctgcaagagggatataagttacggcagattcctcacggatcgcaaattccagtgcttctgcattgccatccagaatatgataaagggtttctacattgctgccgatgctgttctgagtggcacggacatactgcaggatataatcagcagtgatatttttcgggtagatgacacttccgatatccagggagtcgatgacatcatcaaattccagacggttgaccttggcaaccagcttggcatcggagatgcttttggcaaagagagcaagaaatacattctcctcatccagatttgtcagagtgacaaaggattcggactcggaaagtccttcttctagcagaagagaacggttcgttccgtcaccattgatgatagtcgcatctggaagcagttcgcttaagtgctcacagcggtttttgttctgctcgatgatcttgacactgatcttcatacccagaagtgcatgggcaagataataggaaatggttccgccacctacgatgatacagtttttgacctgattggtcttgagaccgatcttacggaaaaatgccgctgcattaagcggagaagccagaatggaaaccatatctccgtcgtgtataatgtgatcaccaccaggaatggatacattgtcacggctctcgatcgcgcagaccagaatatcacttcggaaagcatctgagatctgggaaacgctcattccgtccagcttgaattccgggagaactttaaacttgagaagttctacacgaccacgtgcaaaggtgtcaatcttgatcgcagatggaaaacggagaagccgtgaaatttcctgggcagcggcaaactccgggttaatgatcatggtaacaccaagacgttctttgatgaatccgatttctttttcataaatggggttacggacgcgggcgatggtctgacagtggttggctttctgcgcgatcagacagcagagaaggttcaactcgtcagaagcggtaactgcgatcagaatatctgcagtatcaacacctgcctccattaaagtattgatgctggcaccattaccgacgattcccatagcgtcgatattttcgcagagatcattgatcttgtcggcaataacgtcgacaagagtgatatcaatatcctctgcctgaagctgctctgcaagatttctaccgacttttccgcagcctacaataattacctgcataatttcctccttcaatagccggtcagggctacaaatcataagtaaaagcgcccatccgtgtaaagataggcaaggatattatagcactgtatatctgatttttaaacagtaatattttcctgtatatatagaaaaaaatggcagaaagatagatatatatgaaggaaagtgaacattcctgttttcacaagtttaaaaaacggtcataaaatatagcgtgatcatgaatgaaaggatttcgattatggaccgatttcagatgaatcgttcgggctgccggccatatcagtatacctgtgggatgaatagcgggatggcaggccggacggatcgatcattttctgatatggcaaaacaggttcctgcaatggcgtatgtgccataccaggaatttgcgcctacctttgagctgaaaaaagctcttcaggtcggaactattttccctgagctttgcaagccgttctgcggcaggagaggaggaagtcgatgatgtatggaaattgtacttccaaaaaagaactgctgcagtttattgaccaggtaagctttgccattgacgatcttctcctttttctggatacgcatccaaaagaaaaaagagctcttgaatattacagtgagctttcagcaagaagaaatgagcttctggaaaaatatgcaaaattttatggaccgctgaccattgataccggaaacgacagcaatcttaagtcatggcagtggatggaacagccgtttccatgggaacaggaaggagggtgcagataaggtatgtggaattatgaaaaaagactccagtatcctgtaaatatcaagacgcctaacgcaaagctggcacagtttatatccagccagtatggcgggccggacggagaaataggagcttccatgcggtatctttcccagcgttttaccgcaccgaaccggatggtcgcggcagtgctcaatgatgtgggaacagaagaactggcacatttggaaatcgtgtccaccattgtccatcagctgacaaaggatctttctatggaagaaatcgagaacagcggacttgggccgtattatattgaccacacggtgggaatctggccgcaggctgcaggtggagtgccctttaatgcctgcgaattccagagtaagggtgatccgatcacggatctgtttgaagatctggcggcagaacagaaggcacgctccacctacgataatatcctccgggtggtgaaaaatatcccggaggttgcagatcccatccgtttccttcgggcaagagaggtagtccatttccagcgtttcggtgaagcactgagatccgtgcaggagcagctggatgccaaaaatttctatgcctttaacccgagctttgatgctccgtgcaaagcctcctgtgaagagtgatggatcagagaaaaaatctgtctgacaggaatcatatctgaaataaaaagagctgcacagccggcaggaatcctgcggctgtgcagctttgaatttgttttcttggaaaaagatgtttgtaacctacatttcttgttatgcgtcttttttatcgtctttatgcagattcttctgtgctgtggaaagcataagtttgatcctgttcagctgatttacttcgctggcacctggatcgtagtcgatggcaacaatgttggcttccggatgctcacggcgaacttccttgatgacaccttttcctacgatgtggttcggcaggcatccaaaaggctggatgcagacgatgttcgggacaccgccatggatgagttccatcatctctccggtcaggaaccatccttcaccggtctgatttccggcagaaacgatgggcgcagccatttttgcaagatcacggatatctgcggccggtgtaaagtggcggctctgctccagagcctcatttgctgtttttctcagccagtcgatggctctgagaccaagatttgcgatggttgccttggatttcttgaatccaagcttttcaaccttgaaattctggttgtagaagcagtagcagataaagtcgataagatccggaacaaccggttctgccccttctgcctccagaagatctgccaggtggttgttggcagcaggcaggaacttgacaaggatctcacctacgataccaacgcgaggctttttctcatcggagatcgggatcgtatcaaaatcatggaccatctcacggcacatttttttgaaggtaccatggctgacgctgctgcctgttacgaaggcaatgacgcgctgctcccagattttgtgcttgcggtttacgatacccttttccagctcgtaaggacgcatgcgatatacgcatttcatcaggatatcaccgaatacggcaccgtaaacgatacgcttgatcagcggcagtgtcagcttaaagccagggttgctctccagtccgcttaagttgagggagataaccggaatctgttccatgccggcttttttcagagcacggcggatgaatgcgatatagttggaggcacggcagccgccgcctgtctgagacatgatgactgcagttttgttcaggtcatatttgccggaaagaagagcatccatgatctgtcccacaaccatcagggacggatagcaggcatcgttgtttacatatttaaggcccacatcaacagcatgcttgttgtcgttggggaggacttccaggttatagccggatgccttaaaagcagcctcaaagattccgaagtggaatggagacatctgcgggcagagaatggtgtactccttacgcatctgcttggtaaaggatatcttctcaatggaagccggcttgatgttcctttttttattctgtgcctgttttgcacggatagcggcgatcagggaacgaatacggatccttgccgcacccaggttgttgacctcatcgatctttaggcaggtgtagatcttgtcacttccatccaggatctcataaacctcatcggtggtaacggcatcaagtccgcatccgaaggaattcagctggatcagatccagatcctctcttgtttttacaaaatttgcggcagagtagagacgggagtgatacatccactggtcgttgacacggatgggacgctccagatgtccaaggtgtgcaacggagtcttcggtaaatacggcgattccgtagctgttgatcatatccgggataccgtggtggatttccgggtcaatatggtatggacggcctgcaagaacgattccgcggcggccggtttctttcaggtactgcagggtttcttcaccctttttctggatatccgtatgtacggctgcaagttcttcccaggccttatgggcagcagctttgacctcggcagcaggaatatcctggaattcttccacaaggcggtttgtcaggatatcctcggaagtaaatgccaagaacgggttgcggaaggtgatggacggatcactgagctcgtccacattgttcttgatattttccgcataggaagtaacgatcgggcagttataatggttgaccgcatccgggaactcgttgcgttcgtaagggatgcatgggtagaagataaacttcacaccgttacggatcagccatgtgacatgtccgtgagcaagcttggccgggtagcattcggattcacttgggatggactcaatacccagctcgtagatcttacgtgtggaagtaggagaaagcaccacctggtatttcagctctgtgaagaaggtataccagaacgggtaattctcaaacatgttcagaacacgtgggataccaacctgtccacgggtagccttatctgcggaaagtggttcataggaaaagagcctcttatatttgtaatcgaaaaggttcgggatatgatccttgttcttttcctttccaagtccgcgctcacagcggtttccgctgatgtatttacggccaccggagaatttgttgatggtcagacggcagttgttggtacatccgcggcagtttgccatggaggtggtgtactggaggctgttgatctgatcaatggaaagcatggaggttttttcaccctcctgatagcgctcccttgcgatcagagcagcaccgaaagcacccatgatcccggcgatatccgggcggatggcctggcagttggcaatcttctcaaagctgcggagaactgcgtcattatagaaggtaccaccctgtacaacgatatgcttgccaagctcggaagcatcggaaaccttgataaccttgtagagggcgtttttgataacggagtaggcaagaccagcggagatatcggaaacctcagcgccttccttctgggcctgcttaactttggaattcataaatacagtacagcgtgttccaagatcaatgggatgttttgcaaaaagagctgcttttgcaaagtcctgtactgtgtagttcagagattttgcaaaggtttcgataaaggaaccgcagcctgaggaacatgcttcgttgagctgtacactgtcaacagtctggttacggatcttgatacatttcatatcctgaccgccgatatccaggatgcagtctacttcaggatcaaagaaagcagctgcgtaataatgggaaacggtttcgacttcaccttcgtcaagaagaagtgccgctttgatcagggcttcgccgtaaccggtggagcaggaaaaagcaatttctgcatcttccggaagaaggctgtaaatctccttgatggagttgatggtggttttcagcgggtttccgttgttactgctgtagaaggaataaagaagagttccgtcttcgcttaccagcgcggtttttgttgtggtagagccggcgtcgatccccaggaagcattttcccttataggtggaaagatctccggtttttaccttgtaggcactctgacggtcatggaaagcctggtagtcgtcctctgtggcaaaaagcggctccatgcgttctacctcaaaatccagcttgatggtagtccgcatgcgtttcttcagttcagtcagggaaacggtaacatcctgctttgcattcagggcggagccgatggctgcgaacagatgagagttgtccggtgcgataatatgttcatcatccagcttcagggttcggataaaagcagtcttcagctcagaaaggaagtgaagaggcccgccaaggaaggcaacatgtccgcggatcggtttaccgcaggcaagaccggaaatggtctggttgacaactgcctggaaaatggaggcagaaaggtcttccttagttgctccgtcgttgatcagtggctggatatctgtttttgcgaaaacaccgcagcgtgccgcaatgggataaagtgccttgtaatgtttggcgtattcattaagacctggtgcatcggtctggagcagagatgccatctggtcaatgaaggaaccggtaccgccggcacagatgccattcatacgctgctctacatttccgttttcgaaatagatgatcttggcatcctcgcctccaagctcgatagcaacatccgtctttggtgccagcttctgcagggaagtggatacggcgataacctcctgtacaaaaggtacttccagatgattggcaagtgtcagtccgccggaacctgtaatgactggacagagtgtcagttcaccaagctgatcctcagctttctgaagaagatctgcaagggtttcctggatatttgcaaaatgtctctcatagtcggagaagacaagcgtatcgttttcgtctaagatcgcaatcttaacagtggtggaaccaatgtcaattccaagtgtgtgtttcttcataaaaaattgatttcctcctcgttgtatctatacagggattgcccgactctgacatttctgtcagatgggagttgtttcttcttattataaaggatttttaagcgaatattctatattatacgatatcgtttaaaaaatggcaatgtaaaagtttaacaatcagtagccgtaaagaaaaaaatgtgttatgatattgactaaaagttttgaaagatatttgcatcggcagctggttatggctgtatctgcgacgcagatgccgggcagagacaactttaaaatgtttttagaagggaaatgaaatggcagaatataaactgatcacaacagaaggaagagcgaaaaggggcgagtttaagacggtccacggaacgatccagactcctgtttttatgaatgtaggaacaattgcagcaattaaaggtgcagtttccactgtggatcttcatgagatcggtacacaggtagagctgtccaatacctatcatcttcatgtgcgccctggcgacaaggtggtaaagcagctgggaggtcttcatgaatttatgaactgggacagaccgatccttaccgattccggcggattccaggtgttttcgctggcgaaacttcgtaagatcaaggaagagggcgtgtattttaactctcatatcgatggtcataagatttttatgggaccggagcagagcatgcagatccagtcaaatctggcttctaccattgcaatggcttttgatgagtgcccaagcagtgtggcagacagggattatgtacagaaatcggtagcgcgtacaacacgctggcttaaaagatgcaaggatgagatggctcgtctgaacagtctgccggataccattaacaagaaccagcttctttttggcattaaccagggagctgtttatgaagatatccgtattgagcatgcccaggctatcgcggagatgaatctggacggctatgcagtgggcggccttgcagttggtgaaagtcatgaggagatgtaccggatcctggatgaggtggttccgcatttgccgcagaacaagccaacgtatcttatgggggttggtaccccggccaatatcctggagggggttgagcgtggtattgacttttttgactgtgtatatcccagccgtaacggccgtcatggtcacgtgtataccaaccatggcaagatgaatctttttaatgcaaagtatgagctggattccaaaccgatcgatgaggagtgccagtgcccgacctgccgtcattacagcagagcgtatatccgtcatcttctgaaggcgaaggagatgcttggcatgaggctttgtgttctgcataatctgtatttctataatcatatgatggaagagatcagggatgcgctggatgcagggaattttgcggcttataagaagatgcgtctggaaggctttgaggaaggcaggatcaacgggaaccggtaagttttatttataaaatttgtgtaaattactttgattttataagaaaactcttgaaggttttttggtttttgtgtatgatagtacgaagtgacacttttagaggtcagtaacggcgggggtaccgcagattatttgtttttagcaggaggaatttgaaatgatcgcatcatctacagcggcagctggcggacttagcgcgggtcttggtattgtctggatcgtagttctgtttggaattatgtattttatgatgatccgtccgcagaagaaggagcagaagagaactcagactatgttgaacagcatggaggttggtgacagtgttgttactaccagtggtttttatggtgttgttattgatatgactgaggaagatgttattgttgagtttggtaataataagaattgccgtattcctatgaggaagcaggcgattgctgaggttgagaaggctgatcaggcttctgcttgatgcttttttcgcaataacttgaatatgagagaggcactgcgtttttttgtgacgtggtgtctttttttgtgtggacgaagggacgccggggaaggggatgctggctggtctgcggcttcgtcaggggctggcttctaggacgccggaaatctgctaaaagcgtttttaaaaagtccgaactcgcggcctgctgccgctcagacagcggacttttgaaaaacaacgcagattcccgccgtccaagaatcagctcccctcctgcagaagcagagccatccagcatcccctgccccggctggtgcttccggtgagaaatagtgtcgtttgacggttggttgtgggtcgtcagcgctgcgctggacgactgcaatggctgagtttgtgttgggttggggggacggctgaggcgctgcgctgtcagcctggggttgcggatgtgctgggattgcggatgtaatgggattgcggatgtgctgggattgcggatgtgttgagattgcggatgtgctgggagtgtggatgtgatgggaatatgacaattgtaatattgtatagaaataagtggatttttgataaaattcgtgtaataatgatgttactatcagaaatgagagtgacgatggctttggaatatcgtaaaattgtaaataagaatgaattttcagaaaggggttggatttatgggtcttatcagagcggctgtgggtgcagcgggtggtacgttggcggatcagtggaaggagtttttttactgtgaggctatggataaagaagtgatggttgtgaaggggacgaagaggtcttcttccaggtcttccaataagcatgggagtgataatatcatttccagcggcagcgggatcgctgtggcggatggtcagtgtatgatgatcgtggagcagggaaaggttgttgaggtttgtgcggatccgggagagtatacgtatgatgcttctacggagccgagtattttttcaggtagtctgggtgacggaatcaggaagacttttgatacgatcgggaagaggtttgcttttggcggtgatacgggtaaggatcagagggtgtattattttaataccaaggagcttgtggataacaagtttggtactgctaatccgatcccgttccgggttgtggattccaggatcgggctggatgtggatgtggctgtgaggtgtcatggtgtttattcttacaggatcgcggatccccttcttttttatacgaatgtgtgtggaaatgtggagcgggagtataccagagaggagctggacggacagctgaaggcggagtttatcagtgcgctgcagcctgctttcggaaggctttcggagctggagatgcgtccgaatcagatcgtgactcataatacggagctggagaatgccatgaatgaggtgctttctgccaagtgggaggagcttcgtgggcttaaggtagtcagtgtggcacttggttctgtgacattgccggatgaggatgccgagatgatcaagcaggctcagcgtacggctatgatgcgtgatcctgctatggctgcggctactctgaccggggcccaggcggatgctatgaaggctgcggcttctaattcagcaggggctatgactggttttatgggcatgggtatggctgctaatgcaggtggtctgaatgctcagcagttgtttgagatgggccagaagcagcaggcgcagcagcagagtgtacagcagcaggcagcgcagccggtttcgccggcagggaacggagcaggggctgcggctggttcctggacctgcagctgtggtgcggtttcttcggggaaattctgtccggagtgtggtgcatcgcgtccggtggaggacagctggacctgttcctgcggtacggtgaataaaggcaagttctgtatgaactgcggagcgaagaaaccggagaagaagatgcagtatcgctgcagcaggtgcggatgggaaccggcagatccggagaatccaccgaaattctgcccggagtgcggtgatccgttcggacaggaggatgcagtatagaccagaaagagagatggtcaggagcaaaatgcagggtaactcctgccggttgttggatacagaatgatgaagtgaggtgaatatatggcgaagatgcaggagtttaagtgtccgtgctgtggtggctccatagagtttgacagttctgtgcagaagatgaagtgtccgttttgtgatacggagtttgatgttggtacgttatcggaatatgcccagactgtggaggaagagcagcctgaggatatgagctggtcggatgaggccggcagtgagtggcaggacggggagagtgaggggctgcgtacctatgtgtgcaagtcctgtggcggtgagatcgtgggagatgccaatacggcagcaacggcctgcccgttttgcggaagtccggtggtaatgaccgggcagctgtccggtgcactgaagccggattatgtgatcccgtttaagctggacaagaaagcggcaaaggagaggctgaaaaagcatcttaccggtaagaggcttctgccgaaagcatttaagtcagagaatcatatcagcgaggttaagggcatctacgttccgttctggctgtatgacacagacgcagacgcagatatccgttaccgtgcaacaaagacccggttctggagcgatagtgattatgattatacggagaccagctattatgcagtacatagaagtggttctcttggttttgatcatgtaccggtggatggctctgccagcatggaaaatgatctgatggagtctatagagccttttgatttcaaagaagcggtggattttcagactgcgtatctggctggatattttgcagataaatatgatgtgacagccagcgagtgtgaggaacgtgccaatgagcgtatccgccgcagcacagaggctgcattccgggatacggtgagaggatacgccagtgtggtaccggagaataccagtatccggcttcataacgggacaacgaaatatgcgttatatcccgtatggatcctgcagacgaagtggaagggtgataattacatatttgccatgaatggtcagacagggaaatttgtgggaaatctgcctacagacaagaacgcttttgcacgatggttcctgggaacaacgggggtcgtgggtgtgatcacttatattatcctgtatctgatctgggctttgtagggaggtggatgccatgaaaaaaagaatatctgtatttttgatatcgatccttttgtgtctggcatgtgcttttccagtatgggcaggcaccgtaagccgtctggatgaccaggcgggacttctggatgcagagcagcaggagagcctgagcagtactctggatgagatcagtgagcgggatcaggtagatgttgtggtcgttaccgttaacagtcttgagggaaaaacagcccaggcgtatgcggaggattattttattgaccatggatatgggcagggggaaaatggtgacggtattttattcctgttggatatgggagaccgtaactgggccattgcaacacacggatatgcgatagaagtgtttacggatgccggacagtcctacatcatggatcaggtgaagccttatttaagtgacggtgattataacgaagcgtttcataagtttgccacggaatgcgatgattttatcacgcaggcaaatgaggcagagccatacgatgtggaaaaccttccggatgagccttttgcggttgggataaacctgctgatcgctcttgctgtggggcttgtggcaggattactggtgaccggaaatatgagaagaaagctgaaaactgtgcgaaaacaggatcgggcggcttcttatgtgcggcagggcagtatgaatgtgaccagaagtaatgatttttacctctacagtacggtatcaaaatctgcaaaaccgaaaaatgaggataataacggtggttccagcacccatacctcatcttccggtgataccttcggtggttccagcgggaaattctgagaagatcatcaggaaaaacagaatatgataaaaaaagaaagactgctgtaccggaatggtagggcagtttttcttttttctgtgtgcgaaagtatgtctctgtggcggcagaaacagggaattgccgtttattttttgcattccggaaataactttatctatttaataggttgaaatccgtcgaaaagtgcgttatgataataacaatctcatctttgacagttgattagttaaaaaagtgccacaatccctgtaaatacaaggggtgtggcactttttcttgcatacacgaaatatagtaatgttttatcttcgtttactttttttctgaattcctttcatttttcgttttgttatgaattgatagtcagttctgaatccacaggtttcatggagatcatcggtgagtccctggcgttcatataccggcatgaaaccctgttcttctacatctgcaaattttatctcctttaaagtatgaagtaattgttctgtagtataagttccttttagggcacggtttaataaccgaaaatgtaacaaagcaagaaaacaggtaaggaaatgggctttgatccggtcttcacggtttaagtaaacgggtctggcttcaaagtctgttttcatagttctgaaacaatcttcaatctgccatctcccttcgctgactttcaagatatctgcaacgtcatcatcaagcaggtctgtacataccgcataaagaccatcatacatttcttcttcagcaatcttatccgtatcgagataatagtggattttagctttttctccttcagcggttacagctaccttatttacaaatcttgcaggatcatttggatttttacgttgtttttttagagagccatttgcaaccattttttctgcccgacaaatctgctctgcacggatagctttctgataagcggcatatttaggggagtaggttatgatcaatctttgatccagtttttttgtcgtaaacggttcatctttataataaagttggttcttatcatcatctgtcagttttttgagatcaacaggtttatcatctgcgagacatttgaatccagttttgtttaaagcccatgtccggtcttcaacaggcagttttttgatggactgagtgacgatgaatgcccgttgtcccatgtgattaaggacacggttatcttcagaagcaagtccggcatcactgcaatatataaacttatcacagccgaattgctggagaatctttgtttctaaaggttttaaggatttctgctcattttgatttccgggaaagagcgagaaagccagtgggatcccgtcaccatctgtaaaaagtcccatttgaataatgggattcggacggtgctccttgctttttccgtattttttatcgccatcttcctgttcaatttcaaagtagtagtttgtgcaatcataataaagaatccgatccattctgtcgccgagaaaaaagctgtttttataaacttctgattgaataaaatccatttcaaaagcaagaacagaaagggctcggtacacatcatgaagttcgtaagtaggaggttcaaggaactgttttgcagtttggaaggaagaacttttgctggaaggttccagaacccttgtataaattaaatcagacaaaatcgcattaagatcatactcgaatttatacctgcttttgatttttcggcagatagaatcaagtttcagaccatagtaaatcgattgaagaaaaagatatccaccagagaaaagtttctgcttattatagtccaggagtctgttggaatgaaaagggatcatgacagtagcatcctctttttcgcttttatacttcagtgtttcaagacgagcctgttcattcgcccattcaacaactccgtcacgatctgtatggagctgttctgataattcagctaacgtacctagctttcggatggtttttgaagtactttttccttcggcatttgtataggactgagtgatataaaaggactcggaattttttgattttgatgttgttatgcgcacaataatcacctctgtcactattataccatatatcactaaatattactatataataaaaataaaaatttgacaaaaaaataagcctatttcaaggctttgcagtactttttttgatttcaatgtgtcaaactcccgtgataccttcggtggttccagcgggaaattctgagaagatcatcaggaaaaacagaatatgataaaaaaagaaagactgctgtaccggaatggtagggcagtttttcttttttctgtgtgcgaaagtatgtctctgtggcggcagaaacagggaattgccgtttattttttgcattccggaaataactttatctatttaataggttgaaatccgtcgaaaagtgcgttatgataataacaattatccacaccagtgcgttaaaattttacagcacaggggaaatcggaggagtgaataaaatggagtacaagattgccctgattccgggagacggaatcggtccggagattgttgccgaggccaaaaaagttttagacagagtatgtgagaaatacagtcataaattttcatacacagaggttcttttaggaggggcatccattgatgctcacggagtacctcttacagaggaagccattgcccaggcaaaagcttctgatgcagtattgatgggttccattggcggtgatgccaagacatccccgtggtataagctggagccgtccaaacgtccggaggcaggtcttcttgcgatacgtaaggcgctgaacctgtttgcaaatcttcgtccggcttatctttacaatgagcttcgtgatgcctgcccgctccgtgatgagatcatcggagatggttttgacatgatcatcgtaagagagcttacaggaggtctttatttcggagcaagaaagactactgaggagaacggagtccgcacagcggtagatactctttcttataatgagaatgagatccgccgtattgccattaaggcatttgagatcgcacgtaagagaagaaataaggttacaagtgtagataaagccaatgttcttgattcttccagactctggagaagtgtagtggaggatgtggcaaaggattattcggatgtaacactggagcatatgctggttgataactgtgcaatgcagctggtacgtgatccgaagcagtttgatgttatccttacagaaaacatgttcggagatatcctctctgatgaggcaagtatggtgaccggttctatcggaatgctttcctccgcaagcttaaatgagacaaagcttggtctctatgagccgagccatggttctgcaccggatatcgcaggccagaacaaggcaaaccccatcgcaaccattctttccgctgccatgatgctgagatattctctggatcttgataaagaagcagatgctgtggaagcagcagtacagaaggttcttacagatggttacagaacaggagatatcatgtctgacggatgcaagcttgtcggaaccaaagagatgggcgatctgatcgcagatgccatcgcataaataaagcgggacagagagaagaaaacgaaacagaacagaaaaaaccggtacctggaagaggaagtctataaacagataccggatcctatcgtaaagaataaaaaggagagaccttaaaaatgaaaagtgataccgtaagaaaaggcacacagcaggcaccacatcgttccctgttcaatgcccttggaatgacaaaggaagaaatggacaaaccactggtaggaatcgtaagctcttataacgagatcgtaccgggacatatgaaccttgacaaaattgtaaatgctgtaaagctcggcgttgcaatggctggcggcacaccggttgtatttccggcgatcgcagtatgtgacggaatcgcaatgggacacgttggaatgaaatattcccttgtaacacgtgacctgatcgcagattccacagaggccatggcactggctcatcagttcgatgctctggtcatggttcccaactgtgacaaaaacgtacctggccttcttatggcagcggcaaggatcaacgttcctactgtattcgtaagcggcggcccgatgcttgccggtcatgtaaaaggacacaaaacaagtctttccagtatgtttgaggcagtaggctcctatgcagcaggaaccatcacagcagatgatctggaagaattcgagaacaaaacctgcccgacctgcggatcatgttccggtatgtacactgcaaacagcatgaactgcctgacagaggttcttggtatgggactgaaaggaaacggtaccatcccggcagtatactctgaacgtatccgtcttgcaaagcatgcaggaatgcaggtaatggaaatgtacagaaggaacatccgcccaagagacattatgacaaaagaggcagttttaaatgcacttacagtagatatggcacttggatgctccacaaacagtatgcttcatcttccggctatcgcacatgagatcggaatggactttgatatcagctttgcaaatgagatcagtgagaagaccccgaacctttgccaccttgcaccggcaggcccgacctacatggaagatcttaatgaggccggtggtgtctatgcggtcatgaatgagctgaacaagctgggacttctccatacagagtgtatgacagtaaccggaaaaacagtaggtgagaatatcaaaaactgtgtaaacctgaatccggatgttatccgcccgatcgacaatccgtatacaaagacaggcggacttgccgtactgaaagggaaccttgcaccggatggtggtgttgtaaaacgttctgcagttgtaccggagatgctggtacatgaaggtcctgcacgtgtatttgacagcgaggatgacgcaattgttgccatcaagagcggtaagatcgtagagggggatgttgtggttatccgctatgagggacccaagggtggccctggaatgagagagatgctgaaccctacatctgccatcgtgggaatgggacttggttcttccgtagccctgatcaccgacggacgtttcagcggtgcatccagaggagccgctatcggacacgtatcaccggaggcagcagtaggcggcccgatcgcactggttgaggaaggcgatatcatcagcatcaatattccggagctgaaactggagatcaaggtttcagatgaagagatgcaggctagaagagaaaaatggcagccaagagagccgaaggtgacaactggatatctggcaagatacgcttccatggtaacatccggaaaccgtggtgcgatcctggaagtaccgaaagcaaaataaggaggaacgaaagatatgcagcttacaggtgcagagatcatcgtagaatgtctgaaggaacagggcgttgataccgtatttggatatccgggcggcgcgatcctgaatgtttacgatgccttatatgaatacaaagatgagatcacacatgtactgacctcccacgagcagggtgcatcccatgctgctgacggttatgcaagagcgaccggaaaggtgggtgtctgcctggcaacatccggtccaggagcaactaacctggtaacagggatcgcgactgcatacatggattccgtaccgatggtagccattactgcaaacgtaggaagaccactcctgggaagagattctttccaggaggttgatatcgcaggtatcgtaatgcctgtaacaaaatacagtttcatcgtaaagaatatcgaagatcttgcagatacgttaagaagagcattttatattgcaaaaagcggaagacccggcccggtgcttgtggatgtcccgaaggatatcacaggaatgaaatatgaatatgagccatgccatccggctacggttaaccgtgagatcaaaagtatccgtaaagaagatattgatcaggcactggaaatgatcagagaggcagagaaaccgtttatttttgttggcggcggatgtgtgatctccggtgctgaccaggaagtacgtgagctggctcgcaggatccaggctcctgtctgcgatactctgatgggcaagggtacctttccgggagaagatcctctctatacaggtatggtaggtatgcacggaaccaagacttccgatcttggcgtaacagagtgcgatcttcttattgttctcggtgcacgcttcagtgaccgtgtaacaggaaataccaaaacttttgcacataatgcaaaaatccttcagatcgatgtggatgctgcggagatcaataaaaatatcaaagtggatgccagtgtgatcggtgatgtgaaggaagtgctgaaacgccttctggaggaaattacgaagaaagaacatccggagtggatcgcacatatccaggaattgaaatcaaaatatccgctgaattatgatcacacacagcttacaggtccgtatattatagagaagctttatgagttgaccaacggtgatgcgatcatctccacagatgttggacagcatcagatgtgggcggcgcagtattataaatacaaagagccgagaactcttcttacttccggcggccttggaaccatgggctacggccttggcgctgcaattggcgcgaagatgggcagaccggaaaaaacagttgtaaatatagcaggtgacggatgcttccgtatgaatatgaatgagctggcaacagctgcacgctgtggcagacagctgatccagattgttatgaacaatcatgtactgggaatggtgcgtcagtggcagacgcttttctatggaaagaggtactcttccacagtactggatgacgccgttgattttgtgaaattatcagaggcgctgggtgcaaaagccattcgtgtgacaaagatggaggatgtggagcctgcacttaagatggcactggcagcagagggacctgtcgttctggattgctggatcgatcaggatctgagtgtgttcccgatggtaccggctggtgcgaaccttgatgatgtatttgacgaggaggatatgaagaaacatgagtagagtgtataatttttctgccggaccggcagtgcttccagaggaagtactcaaagaagtagcggatgagatgatggattataacggcacaggaatgtctgttatggaaatgagccacagaagtgcagcttttcaggagatcattgatactgcagagaaagatcttcgcgagcttatgaacattccggataactacaaggtacttttccttcagggaggagcatcccagcagtttgccatgatcccgatgaacctcatgaaaaacaaggtcgcagattatatcgtaacaggacagtgggcaaaaaaagcttatcaggaagctcagaaatacggaaaagcaaacaagatcgcctcttctgaagataaaaccttcagctatatcccggactgcagtgatctgccgatcagcccggatgcagactacgtatacatctgtgagaacaacaccatttacggcacaaaattcaaaaaacttccaaacacaaaaggtaagactctggtagcagatgtatcctcctgcttcctgtctgagccggtggatgtaagcaaatatggtattatctatggcggtgttcagaagaacatcggaccggcaggcatggttatcgtgatcatccgtgaggacctgatcacagaggatgttcttccgggaaccccaaccatgcttacttataagacacatgcagacgcaggctctctttacaatacgccgaatgcttactgcatctatgtatgcggaaaagtatttaaatggctgaagaaaatgggcggtctggaagtgatgaaacagcacaatgaggaaaaagcaaaaatcctttatgattacctggattccagcaagctgttcaaaggaactgtagttccggaagacagatctcttatgaatgtaccgttcgtaaccggtgacaaggaaatggatgccaagtttgtcaaagaggcaactgaagcaggacttgtaaacctgaaaggacaccgtactgttggcggaatgcgtgccagcatctacaatgccatgccaaaggccggcgtagaggcactggttgcattcatgaaaaaattcgaggaggagaatgcataatgttccagtatcattgcctgaatcctatcgctgaaaaaggtctgaaactttttggcgataattataaaaaaacagagaccgctgaccagtgtgatgcaatccttgtaagaagtgcaaaaatgcacgacatggagctgccgaagagcgtttgcgcagttgcacgtgcaggtgcaggcgtcaataatattccggttaaggagtatgcagagaagggtgttgttgtattcaacacgcctggagctaacgcaaacggcgtaaaagagctggtacttgcaggtatgctccttgcatccagagatatcgtaggaggtatcgagtgggttgcacaggagaaagataaagagcacatcggcaagcttgccgagaagcagaaaaaacagttcgcaggatgcgagatcagcggcaaaaagcttggtatcatcggtcttggagccattggagccatggtggcaaacgcagcatgcggtcttggcatggaagtatatggctatgacccatatctttctattgatgcggcatggaacctgtccagaaccatcaagcacagcaagagcctggatgagatctacagccagtgcgattatatcaccattcatgtgccgcttcttgacagcactaagaagatgatcaacaaagaagctttcgataagatgaaggacggcgtagttcttctgaattttgcaagagatcttcttgttgatgaggatgcgctgatcgaggctgttgagagtggcaaggttaagaagtatgtaactgactttgcaaatgagacagttgcaggacgcgagggtattctggtaactcctcatcttggtgcgtctacagaggaatctgaagaaaactgtgcagagatggctgtaaaggagatccgcgattaccttgagaatggtaatatcaaaaattcagttaattatccgaactgtgatatgggtacctgtgtggctgttggaagaatctctcttgcgcacagcaacacaccgaatatgatcagtcaggttaccaagatccttggatctgagggactgaatattgcggatatgacgaataagagtaaaggggagtttgcttatactcttattgatcttgagagtgcggcgtctgctaaggcgttggatgaactcaaggagattgagggaatgtatagggtgcgtgttgttaagtaaagtaacaagaggttagaaatacttttttttaaatactgtgtggcgtttgcttttttggcgaatggcatgcagtatttttttgaggaaaaaggaaaaccgcaaaggggccgcaaagccgcggcccctctgcacacccctcgggctttttttaggagtgcttggttgtggaggacgggagttttgttgacttgtgtctgtatgcgacggtgctgggaacgaaaggttgagccgatggaggagaacggcctgaaggggttgttgagagtgaaaaagtcttgaggccgttataggtatgtgacggtattggatgtggaaggttgagccgagagtgagggtgggagggcgttgataggtctcgatgtgcggggcacatctgcggattttttggaataatatagaagtgaatttgagtggtaaatatatcaaatgcagatatattaaatgatcaaatgtaaatatatcaaatgtaaatataccaaattcaaatatatcaaatgatcaaatgtaaatatatcaaatgcaaatatatcaaatgcaaatatatcaaatgcgaatatattaaatgtaaatatatcaaatacaaatataatgtgcaaatataatatgcgtaatgatattggttgtaaatttttatacgataagatattaataaaaatatatgatataacagggaaaatatgaagaatacacaacaattggcggataggcgtgaagggtcgtctccgcggtacgtgcccggaaagagggggtgcagggggagaaaaacgggcttcgtaactttgagtgctttctccccctgcggtgttttctcagcttttcaaagccaataaacaaaaaaataattcaataaaagaaaaacatacactacttgcgggatgcaatgaagtcaagaacttcatctctttcaggcattacgcggagtgctcccttctttgttgtgatgagagaagctgctgcatttgcaaaagtaagcagctctgcgagattttcgtcagtgagatcctcaagaccgtgttccagcacataattcagggtgcttgcacagaaggtgtctcctgcaccggtggtttcaatggttttttcctgaaggaaaggagcagcctcgaccttccgtccgcgataataagcgcggcttccgtcttttcccattgtgatcagcacaagcgggatatgatatttttcttcgataagggcagcacccttgtcataatctgttgtgtcaaaaagaaattccacttcattatcagaaatcttcagtacatcacagcgttccatgccgtattcgatctctttgcgggcatcgttcagatccttccagagtggagggcgtaagttcgggtcaaaggtgatgatgcatccggcttcttttgccacgtcaagagcatagcgggttgcttcacggacaccctcatgtgtggaagaaagcgtgccgaaatggaaaatcctggaattgcggatcagatcggcatctacctcatcctttgtcagcatcatatctgcacctggattacggtagaaagaaaaatcacggtctccgtccgggtaagtatgtacaaaagcaagggtagtgtgaatttcatcgtccatgacaagatttctggtatcaatgccgcattcttctacggcagccttcagctgtttgccgaacatgtcgtttccgacctttccgataaatgcagtttttttgccaagacggttcagcatggcaagaacgttacagggagctccgcccgggtttgcctcgaaagtagggtttccctgggaactgtcaccgttttctgtgaagtcgatcagaagctcgccgagagctgttacatcatactgtctgttttccattgatgattcctcctgataagttatttgtttcatattctgcttcatattataatcgttacacatgattttgggaagaaccaaatcgaattattttctgttctgttaccggttacttgtggtgctttttgcgaagattagaactgttatctttatttttctgtaaaatggtggtaaacttagtctataaaacaacaaatatgatggaggagacgattatggctgataaagcgtatgaatatatggattggccccggatcgaggcgatcgtttatggggaggaggcatcacctcgtgatgtgatgcagccaagggtaacagaggatggcgttctgatccagggattttttccgggagcggatgctgcagaggttgttgtaggggaaaagagttatccgatgatcctggaagatgaggctggttattatgctgtaatgcttccactgaaaaggattccggaatatcgtttccgtgtgataagaggaagcaggaaagagactttttacgatgcgtatgaatgtccatgccagatcacggaagaggaggaacgagctttttgtgccggtgtctattacaaggcatatgagaagctgggagcgcatccggggacctgtggcgaggtagaaggaacatattttgctgtctgggcacccaatgcaatccgtgtcagtgtggtcggtgattttgacaggtgggatggaaggcgtcttccgatgcatcggatgccaatgtccggaatttttgagatttttgttccaggtgtacaggcaggggcctcttaccagtatgagatcaagatcaaaggcggcaatgtacagcggaagtctgatccttacggaaatggaacccagggagcgccgtctgtgatttctgttgtaacagagctgggggagtttttatggcaggatgaagcgtggatgaaggaacgtgaaaggtttgccagccgtgaagttccggtttctatttatgaaacggatgtaacagagtggaaaaacagtggtgaattggtggagtttctgaaggaaaccggttatacgcatgtagaatttcatccggtgatggagtatcttgaccgaagttcaggaggatattctacgtctgcgtattatgctgtgactacccgttttgggactgcggcagatttccggacactggtagaggatcttcatcaggcagggattggcgtgatcctggactggacaccggctcagtttccgcggtttgatgcagggcttgagaaatttgacggaactcctctttatgaagtacaggatccggctatggccgttcatccgatgtggggcaccatgctttataattacggaagtcctatggtcaaagatttccttatttccaatgcgtttttctggctggatgaatttcatgtggacggatttcggatggatgatgtagatgcgatgctgtatctggattttggaagagaggcgggccagtggacggctaatctttatagttccaatgagaaccttcaggcaatggagtttctgaagcatctgaattctattgtgaagaagcagtatccggggattcttctgatcgcacaggaggatggtttatggccgcagcttacagacagtgtggagaatgatcatctggggtttgactataaatggagtggtggctggacaaaggatcttctttcttacctggaagcagagcctttggacagacgaaattattatgatcagctgacgctttccatgatgtatgcatatagtgagcattatgtactgactctggggaagagagatgtgggtacgttaaaagagtttcaggagaagcttccgggatcttcaaggcagaaggatgctcagctgcgtgctgcgtatggctatctgatgcttcatccgggtgtgaagatgactgcgccggatggggatgtggggccggaaatgagggcgtatctgcatgatctgaatgaactttacaggaatcatccggcgttgtatgcaatggatggtaattcggatgggtttgagtggatccagtttaccagctatgatgagaatgtggttgcgtttcttcgtaagacggaaaagccggaagaaacgattcttgcggtgtgtaatttttcaccggtatcttatgacagttaccgggttggtgtgccttttgcggggaaatataaggaaattttcaacagtgacagtgaaaagtttggcggacagggtgtggtgaacgcacgggcgaaagcggctattcatatggagtgtgataacagggaattttctttgaagctgaagcttccggcttatggtgtggcggtatttgggtgtacaccggagaagggggatgtgaagaaaaactctgtgaagaaaggaaatgtgaaaaagactgtggggaaaagcagggggaagcgtatggataaggcgaaaatgaaggtggttgaaaaatctgtggctgtaaaggatgcggtaaaggttgtgaaacgggtggcttctcgcaggaagggggcttccggggatgagtgatggtttgtgaattaaatgggaatatggttgggggtgattggagggtaaggatttgagtggattgtaggaaaaagtgcttgcattttttgtaaaatacggtataatatcagttgtgtttagcacaagctggaatagctcagtcggtagagcacttcactcgtaatgaaggggtcgtgagttcgagtctcatttccagcttatatatgactgatgggagtccggcgtctttggaatatgaagatgccgggctttttttggtgtgtatggatgtggtcgagggacgccagaggaaggtggcatcgttcggtggatgcagtcggggatgtttttgaggttttgtgagaaggatggagagggacgccagaggaaagtgacatcgctccgggggtggatgcaagcggggatgtttttgaggttttgagaggtggatgtggttgagggacaccagaggaaggtggcatcgggccgggctgctgcgaaggaggggtgattactacttgggctgcgggagacggcgttattgcggcagggtctgctgtctgagccggaggcgagttctggccctgccgcaatgcttttagccgtctcacggagtcctagtagtatcccccgacgtagtccctgcccggagcgatgccaccttcctctggctgacgcttccagccgacaggaaaaaacatgcggggtatggaagcggactgggcgtcctgtcctgaaatgttagactggcacagaatattcctataagtatcgaagaatacagaaacaggatcggcacagcgtatcaccataaatatcgaagaatacaagaactagatcggcccagtgtatcaccataaatatcgaagaatacagggaccagatcggcacagcgtaccatcataaatatcgaagaatacagggagcagatcgcagatcggcacagcgtaccaccataagtaccgaagaatacagaaaccagatcggcacaacgttccattttgagtaccgcagcatacagacaaaagtcaacaacgcagcacacacaacaacgaagaattacttccgtgcccaagagggtgggggtgcagggggagggccttcgggctacggaactctgagatggccttccccctgcatattcccgcattgaaaatgcgaccggcgtagcgccatacagcgaagagtcttattaaaaaacaacacatataaaataataaacaggaagataatagcataatagatgaatgatagcagaaaagaaattgtcctataaaaataaacttccaggaaaatctaaaaaaaattgaaatttatggttgacaagcataactcccagtggtattataactgagctgtcgcaaataattgttttcaaaaaacaaacaattaaaaagaatttcagaaaaatgaaattcgcagtcgacaaaagacagaagatatgataaagtatccaagtcgtcaacgaaacgacaacaaaatcttaactcaaaaatatttgaaaaaaacttaaaaaagtgcttgacaaacaaaaagagatgagataaaataaacgagctgtctgagagacagacacaacaaaccttgataactaaacagtgaaacacatacgattctcgaaaatttctttacatttaaagaacggtttaaacaaaccaaaagcagtaaaaacgagagatagccaaacggttgtcttgagtaaacgaatcaaacattttatcagagagtttgatcctggctcaggatgaacgctggcggcgtgcttaacacatgcaagtcgaacgggaaaccttttattgaagcttcggcagatttggattgtttctagtggcggacgggtgagtaacgcgtgggtaacctgccttatacagggggataacagtcagaaatgactgctaataccgcataagcgcacagagctgcatggctcggtgtgaaaaactccggtggtataagatggacccgcgttggattagctagttggtgaggtaacggcccaccaaggcgacgatccatagccggcctgagagggtgaacggccacattgggactgagacacggcccagactcctacgggaggcagcagtggggaatattgcacaatgggggaaaccctgatgcagcgacgccgcgtgaaggaagaagtatctcggtatgtaaacttctatcagcagggaagaaaatgacggtacctgactaagaagccccggctaactacgtgccagcagccgcggtaatacgtagggggcaagcgttatccggatttactgggtgtaaagggagcgtagacggatggacaagtctgatgtgaaaggctggggctcaaccccgggactgcattggaaactgcccgtcttgagtgccggagaggtaagcggaattcctagtgtagcggtgaaatgcgtagatattaggaggaacaccagtggcgaaggcggcttactggacggtaactgacgttgaggctcgaaagcgtggggagcaaacaggattagataccctggtagtccacgcggtaaacgatgaatgctaggtgtcggggagcaaagctcttcggtgccgccgcaaacgcattaagcattccacctggggagtacgttcgcaagaatgaaactcaaaggaattgacggggacccgcacaagcggtggagcatgtggtttaattcgaagcaacgcgaagaaccttaccaagtcttgacatccctctgaccgactcttaaccgagtctttccttcgggacagaggagacaggtggtgcatggttgtcgtcagctcgtgtcgtgagatgttgggttaagtcccgcaacgagcgcaacccctatccccagtagccagcggttcggccgggcactctgaggagactgccagggataacctggaggaaggcggggatgacgtcaaatcatcatgccccttatgatttgggctacacacgtgctacaatggcgtaaacaaagggaagcgaacctgcgagggtgggcaaatcccaaaaataacgtcccagttcggactgtagtctgcaacccgactacacgaagctggaatcgctagtaatcgcggatcagaatgccgcggtgaatacgttcccgggtcttgtacacaccgcccgtcacaccatgggagtcagtaacgcccgaagtcagtgacctaaccgcaaggaaggagctgccgaaggcgggaccgatgactggggtgaagtcgtaacaaggtagccgtatcggaaggtgcggctggatcacctcctttctaaggaaaaagtagagaaacaagatgtgttttactgtttagctatcaagctgagatatttctggtgccgatgcggttgggggacacacccgttcccatcccgaacacgacggttaagacccaatcggccgatggtactgcactggagacggtgtgggagagcaggtgggcgccagatcaaaaaaagaaggacagggaaacctgatgagatagatgctggttttaccagtgatctgagagaaaaagctattttcctttcagatggctgataaaacatcagtcagcattgtaccttgaaaactgcatacatgagatttgattaagttaatcaaatatccttaaacgcaaagtattaagaaattaatgcaaacgcaaagataggaagacatcgatttatctgttattgaacagagtaatcaaacacatgtcggaagatacgagagtatcggaagacacgagaatcaagagaccgcatcacctacgctagggtgatgaagcgaaaggtcaagcaataagggcacagggcggatgccttggcactaagagccgatgaaagacgtgataagctgcgaaaagcttcggggaggagcaaatatcccgtgatccggagatgtctgaatggggaaacccgcatgagcagacctcatgcatccatacgccaatccataacgtatggaagggaacccggggaactgaaacatctaagtacccggaggaaaagaaagaaacatcgattccgtaagtagcggcgagcgaacgcggaggagcctaaaccggtgtgcgtgcatgccggggtcatggactgcatttaagattcagcgaagttaacagaacggttttgggaaagccggccggagagggtgaaagccccgtacgtgaaagcagagctgactgagcaggatccggagtaccacgagacacgaggaaccttgtgggaagtaagggggaccaccccctaaggctaaatactacttagtgaccgatagcgcatagtactgtgaaggaaaggtgaaaaggaccccgggaggggagtgaaagagaacctgaaaccctgtgtctacaagctgtggaagtactttatatgtacgaccgcgtactttttgtagaacggtccggcgagttacgcttactggcaaggttaagcacttcaggtgtggagccgtagggaaaccaagtcttaatagggccagagtcagtaggagtagacccgaaaccgggtgatctatccatgtccaggttgaagctgccgtaagaggtagtggaggaccgaacccacatccgttgaaaagggtggggatgaggtgtggataggggagaaattccaatcgaacccggagatagctggttctcctcgaaatagctttagggctagcctcggtgtgagtcttgcggaggtagagcactgaatttcctagggggcgtcaaagcctaccgaagaatatcaaactccgaatgccgtgtagatatcaccgggagtcagactgcacgagataagttgggcggtcaaaagggaaagagcccagacctacagttaaggtcccaaagtgcgcgttaagtggaaaaggatgtgggatttcgaagacaaccaggatgttggctcagaagcagccatacattcaaagagtgcgtaatagctcactggtcgagaggtcctgcgccgaaaatgtccggggctgaaacgcgccaccgaaactaaggaatctgaaaagattggtagaggagcattgcatgcgggaagaagcagtaccggaaggagctgtggactgcatggaagagagaatgccggaatgagtagcgagatagaggtgggaatcctctaggccgaatatccaaggtttccagggtaaagctgatctgccctgggtgagtcgggacctaaggtgagggcgagagccgtagccgatggacaacaggttgatattcctgtactgcagtatgacagaactgtggggacacgtaaggagagcgggagccgggaatggaaagcccggtacaagcgaggtaccagtcacataggaaaatccgtgtggcaatgggaagacgtgatgtggagcgaagattagtagcgaagcccgtgagccatgcgtcaagaaaagccgctatcgttcatattgtacccgtaccgtaaaccgacacaggtggatgaggagagaatcctaaggccggcggaagaagtattgccaaggaactcggcaaaatggccccgtaacttagggagaaggggtgcctgcgagagcaggccgcagagaataggctcaagcaactgtttagcaaaaacacaggtctatgcgaaaccgaaaggtgaggtatatgggctgacgcctgcccggtgctggaaggttaagaggagaggttagcggtaacgcgaagctttgaatttaagccccagtaaacggcggccgtaactataacggtcctaaggtagcgaaattccttgtcgggtaagttccgacccgcacgaaaggcgtaatgatttgagcgctgtctcggcaatacatccggtgaaattgaagtgccagtgaagatgctggctacccgcgccaggacggaaagaccccatggagctttactccagtttggcactggggtccggtgttgcatgtacaggataggtgggaggctgagaaacggtagcgtcagttgccgcggagccgctgttgggataccacccttgtgatattgggcttctaaccagccgccgtaatccggcggtgggacaatgccaggcggggagtttgactggggcggtcgcctccgaaagggtatcggaggcgcccaaaggttccctcagaatggacggaaaccattcgaagagtgcaaaggcagaagggagcttgactgcgacaccgacgggtggagcaggtacgaaagtagggcttagtgatccggtggtattaagtgggaatgccatcgctcaacggataaaagctaccctggggataacaggcttatcactcccaagagttcacatcgacggagtggtttggcacctcgatgtcggctcatcgcatcctggggctgtagtaggtcccaagggttgggctgttcgcccattaaagcggtacgcgagctgggttcagaacgtcgtgagacagttcggtccctatccggcgtgggcgcaggatatctgagaggagctgtccttagtacgagaggaccgggatggacggaccgctggtggaccggttggcttgccaaagccatggccgggtagccaagtccggaagggataaacgctgaaggcatctaagcgtgaagcccccctcaagatgagatatcccattcttatgaagtaaacccccttgaagacgacgaggtagatagggcagaggtggaagtgtggtaacacatggagctgactgttactaatcgggtgagggcttgaccaaaaagccgaggaagcgggcaggatgtaacagaaatggggcggaacaagcttgcttgtggagaaccatttatggtacagactgaacatttgcgaagcaaatgacatcgaacgacggagtcgtgagatgacccccgctggagtagccaaaagaacaggtgatgcagctttagctgcgagcccgtgaagaaagctacgaatcggtacgcaggttgaaattgattcaaaaaacgattaaccatcaacagaacatgtatgtagttttgaatatacaatcgtagaaaagtggcttaaacagccactttttttgtgctataataaagaaatattttaccatcaatttccctgtcaactgaaaaaagtttctctatttacagtccacagcaaaacgaaaggatttatttatccaatgcgttgtaaaaccccttgcttcagctatagggatataagacgcgtccatcgaatttatgcaagtaattgaagatggacaaaatagtaattgtattaactaatgaaccatagtataatataaatatgaacacaacatataaatcaaacaacaatgtcgtctattcctgtaaataccatgtagtatggtgtccaaagtatagacgaaaagtattaattaatggtgtggacgtccggctgaaggagctgctcacagagtatgctgcaaatctttctgtagacattctggaaatggagatcatgccagaccatgttcatatgcttttggaagtagatcctcagtttggcatccacaaagctgtaaagtcatttaaaggctatacgtccagaattttaagacaggaatttccctatcttaaaacgaaaatgccgactctctggacaaacagctattttgtatcgacggtgggcggtgctccgctggaaacagtaaaacagtatattgaaaaccagaaaacatcgcagagacaaaaggataagatgggataatgcaaaaaggaattaaatttagaatctacccgaacagagaacagaaaaacttcatccatcagaccctgggatgctgccggttcatctacaaccggggacttgccatgcgtaaggaaggctatgaaaatggggaaaagatcggctattcccagacttccgccatgctgactgaactgaaaaagcaagaggagtttgcctttctgaaagcagcagattccattgcattacagcagtctttgcgggatctcgaccggggatttgtgaatttctttgagaaacgggcttcctatccaaccttcaaaagtaaacataaccggttccagtcatacagaacggtaaatcaaaaagataatattcgtattgtgggaagatatatcaaacttccgaaacttggatttgttaaaatacggcagtcgatggaagtggaaaagattaatcacgtgatcattgagcacacaccggctggaaaatattttgcggttttaaatgttgattttgaaccggaaccacgctcaaatgctgggggaacgatagggattgatgtcgggatcaaagcgttctactccgacagtaatggaaatacggtatcaaatcccagatatctggaacgcttaatgcgaaaactcataagagaacagcgcaggctttcccgaaaacaaaaagattcccataaccgcgagaagcagcggatcagggtggcaggagtgtatgagaaagtaaccaatcagcggaatgatttcctgcagaaacagtcaacgatgctggtgcgtgaaaaccaaatcatctgtattgaagatctgaatgttaaggggatgatccggaatcataaactgtcaaaatcgatagcgagtgtttcctgggcaaaattttttgaaatgctgaaatataaagctggctggtatggaaatgaaattcacagagtaccaacgatgtatccgagcagtcagacctgcagctgttgtggctacagaaatccacggataaaaaatctgggcattcgtatctgggagtgtcccaaatgccatgcggttcatgaccgggatacgaatgcaagtatcaatattctgaaaaaaggactgcagatgcagtctgcataaagataaaaactgtaccgtagggcatacgggaacagtataaatatagcttgtggacactgtgtaagacattgcagtaccgtaaggtgtttgccaatgcagtagtgggagaagcaagaatccccctgctttagctgtggggagtgtcaacagaaggacatctacacaggagagcagtggctggagatcatgccgcaaaaagcatccaaagcgcaggctgctttgcagctaaaacaaaaactggaatgtgacagattagttgtttttggtgatggaaatatctccaaaaaatatctatttccaaatcaactgttttatgatatcatatagcttaacctgcggaaaatggaggttataagacatgaatcatattgaagaaaagatcattcagactatagatgaacacagagatgagatcatagcctttgcgaaggatatccagagccatccggagccgggattttatgaggagagaacagccgcacatgttgcggtttttttgcgtggcctgggacttcgtgtgcatggaggacttgcacgcacaggagtccgcgctgagtggatggaacaggacggaccgaacattacgattatcggagaacttgacgccatcggatgtaagtcgcatccgatggctgatcccgttaatgggacagcacatgcatgcggacaccacgcacagattgcagccatgatcggcgcagcattggcactgaccaatgaggaggttcaagcctctctgtctgggtccgtatctttttttgccgttccggcggaagaatacattgatgcagataaacgtgcatggcttcgtaaagagggaatcggctttcctgcatccggaaaaagcgaactgatccgtcttggagaatttgaccattctgacattattctgacaactcacgtgcacatgatgcaggtggaggaagacttctatctggggaatgcggcctgcaatggattttccgcagaacgagtgacagtaagaggaaaagccgcacatgcagccattgatccatgggatggtgtcaatgcattaagtattacttccagtgccatccagatgatgggactgatgcgggaaaccttccgggaggaagaccatgtgcgtcttcacaacgtgatccgaaaagccggagatgtgatcaatgcagttccggacgaagcggtgatcgaaacaaaagtccgtgcagcgtctctggatgcaatccgggcaacacaggaaaaaatggaccgtgcctatgacggagctgcctatgcattcggtggtacgatcgaaagagaaccgcttcagggatatatgccgatcctgcacagaggtgcggataaagtgatggaagaatccgtaaagcttctggatgtttcataccgatgttcaaagccggcagattttaacaacgcctgtaccgacgtaggagacctgacccatctgtttccagtgctgaattttacattcggaggatttgcgggaaaacttcacggagcagattttaagatcatggatgaagaactggcatatatcaaaccagccaagcttctggcactgactacgtatcgtcttctttgtgatcaggcaaaagaagcaaaaaaaatctgtcgggaatttaaacctgtatttaataaagaaacttattgtcagtatatacgagataattttcatgaaaatgagtagttaaccgaatcagagaagtcctatgagggtacaataagcaatcttggatcaggaaatcctatgagggtacaataagcaatcttgaatcaggaaattccatgcggggtacaataagcaatcttggatcaggagaatcccctgtgagagaacaataagcaatcttatatcagagaagtcccatgcagggtacggatatcatagcaaacagaaggagaactaaatgtccgaaatttcattagaactgaaaaacataaaaaagagcttccaggaaggtgaggacgtcctggaaagcatttgtcttacagcaaaaaaaggagaatttgtcactctgctggggtcttccggctgtggaaaaaccaccacactgcggatcattgcaggcctggaacagccagattccggccaggtttttctggatggaaaggatgtgacatccctggaaccgaatcagcgcaatgtgaacacagtgttccagaattatgcactttttccccatatgaatgtagcagataacattggatatgggctgaaattgaaaaaaacatcgaaagcggagatcagcagaagagtcaaagaaatgctggatcttgtccagcttccgggctttgagaggcgtaagccgtcagagctttccggcggtcagcgccagcgtgtggccatagccagagcacttgtgaacaatccggaggtacttcttctggacgaaccccttggtgcgctggatctgcagctgaggcgtgccatgcagcacgagctgaagcgcctgcagaagaagctggggatcacctttatctatatcacccacgatcaggaagaagccatcaacatgtctgatacgatcgctgtgatgaaccacggacgctttgagcagatcgggacgccggatgaaatctataatcatccgaagaccagctatgtggcaacctttgttggaaatgccaatatactgaccggtattgtggaaagcattgcggaagaggagtctgacggtacttccgctcagatcaccgtaagaactgatgccggaaaagtaaaagtatcaatggacaccgcagctacatctgacagaggatatttcccacaaaaaggagaaaaggttaccatcgcagtaagaagcgaaaatatccggtttgaggaaaataaaaaaaatgcacaacaaagcacgccgaattgcacatcagaaaacacacaaaagagtgtacaggagcccgcagaaaaaaacacagatgacagctgcgatggcttaaccgccgaagtcattgaaaaaaccttcgccggcggccagctccgtgttgttttgaaaacttcggaaggtcaggaaatcgtggcaagccgttacggcattgatacaaatgtcagtgtaggagaaaaggtgcgctgctgttttcttcctacagatgcagtgctggtagatcgggaagaaagatcagaagaagtattgccggatcagtcaggtccctgtgcaggaggtacccatgcgtaagcacagagcaggctccgtatggatgatcctgccactgtatctttttacactgatcttcgttgcactgcctcttctgtatgtagctgcactgagcttttccacagcagacggcggctacggcgtgaattggaaatttactctggataattacaagcagatcctggagcctgtatacctgcagacctttacaggatccttccgccttgcgctcaccagcactttgatcatctgtctggtgggctaccccttcggatactttatggcaaagctttccgagggcaaaaagaagctggccatgcttttcctgatgctgcctttctgggtgaattccctgatccgtctttatggctggatcatcattctccagaaaaagggccttctgaattatctgctgatgaagcttggcatcatccaggagcccttaaaaatcctgtacagctatccggcgatcgtgatcggtatgatctatgtattgctgccgtttatggcactgtccgtatattccagtgcggaaaagctggactggtcccttgtggaagctgccagagaccttggagccagcagatggaaggctttctggagcgtcacctttaagctgactttgccgggacttctttccggagtgatacttacctttattccgtctatgggtctgttttttattgcggatatcctgggcggaaacaagatcgtacttgtgggaagtctgatccaggagcagatgacaagaggcaataactggccctttgccgcagcactggctgtggtactgatgatactgacaactctgatgatcgtattatatcggaagcttaccaatgtgaaggaactggagggaatcggatgaaaaagaactcaaagctttcaggactgtacctggggatcctgtttttccttatgtatctgcccattggtgtggtagtggtattttcatttaatgaagcaagacttccggtgcgctttaccggtttttccctgaaatggtatcaggaactgtttcaggacagggatctgatccaggcattgaaaaacagtctgatcctggcggtgtccagctgtggggtatctgcagtgatcggaacactgggggctgtaggactttccaggatccactggaaaacaaaaggggtgatggagtatatttccattctgcctctgatgatcccggagatcattctgggaatggtactgatggcatttttctatatgctgaacctgccatttggaatgctgacacttctgatcggacacacggttttctgtgtgccctatattttgatggaggtaaaagcaaggcttgtgggaatggatccgtccctagaagaggcagccagagatcttggtgccggttcctttcgggccttctgggacattaccctgccgctgatcatgccggctgttatatccggctctctgctggcctttgccatgtccatggacgatgtggtgatcagcatttttgtaaccgggccacgtgtatccacgctgccgataaaagtttacacacagatgaaaacaggcgttacgccggagatcaatgcactttgtaccataatgctgggagtgatccttctggtactggcagtatatctgatcgcaggaaaacgcgggaaggggaatataaaagatgagcaataaactgatcgagttaaaaaatctcacaaaaaactttgatgaccagcaggtgctccggggcattaatctggacattcacgaaaacgaattccttacgcttctgggacccagcggctgtggaaagacaacaaccttaaggatcattgccggctttgaggagccaagcggcggagaggtactgtttaacggaattgagatctccaagctgcctccatataaaagagagatcaacacggtattccagaaatatgcattgtttccgcatctcaatgttatggacaatatcggtttcggcctgaatctgaaaaaggtagataaatctgttattgagcagaaggtaaaaagaatgctgaaaatggtagggctggaaggcttcgaaaaaagagatgttacacttctttccggtggacagcagcagcgagttgccattgccagagctcttgtcaatgagccgaaggttcttctgctggatgagccactcggcgcactggatgccaagatccgtaagcagatgcagatcgagctgaaaaagatccagagagaggtagggatcacctttatctatgttactcatgatcaggaggaggcactttccatgtctgatacggtagtagtcatgaacaacggtgagatccagcagatcggcagcccgacagatatctataatgagccggagaaccgttttgttgccggctttatcggagagtccaatattatagaaggaacgatgatcagggatttccttgtggagtttgatggcttccgttttgaatgtgtagacaagggatttgaggacaacgaagccattgaggttgttctccgcccggaggatctggatattgtggaaccggatcaggccaagatcagaggaacggtacggaacattacgttcaagggcgtgcattatgagatcctggtcgagacggagcttcgcacatacatggtgcacactaccgattatgcagaagtgggacgtgaagtgggactgaagtttggtcctgaggatatccatgttatgtgcagaatgggaggatactaatgaaacagttcaagcatctgatcaagccgtatatcatctgggcttcgatcctgatcgtggtaccattgatcctgatcgtgctttatgcatttacctcagatggaaatgaagttctgaccctgcattttacatgggcgaattttgcaaaatttctggaagctacatatttaagtgttatcctgaaatccttccgcctgggtatcctgaccacactgatctgcctggtctgcggatatccgctggcatacattatctccaaatattccgaaaaggtgcagagctttctgatccttatggtcaccattcccatgtggatcaacatgcttctccgtacctatgcatggatgaacattctttctgacaatggtctggtgaacaaccttctgaaaatgctgggaatctcaccgatcaccatgatgtatacagatttttccgttatcgtgggccttgtttgtaactttatgccctttatgatcattccgatccatacatccttaagtaaaatggacaagtcactgatcgaagcggccaacgaccttggtgccaatccctttcagaccttctggaggatcacctggaagctttccatgccaggtgtggtcaatggtatcatgatggtattccttctgtccatatcaaccttcgttattccgaagcttctcggcggcggccagtacatgctgatcggtaatctcatcgagtcacagtttatttctgtaggtgactggaacttcggaagtgccatctctctgatcctggcagtgatcatcctgatctttatgagcctgatgaagaagatggatactcaggacgattaaaggaggcaggagatgaaaagaaaaaataccatattttcaaaattatatgtagtgctgtgtctggcatttttttacctgccgatccttgtgaccatgatcttttcctttaactcatccaagtccctgaccagatttacaggattttccctgcgctggtacggagagctgataaacaacatggagatcagtaaggcagtttatgtttcggtcacagtggcaattctggcaactgttatttccacagtgctgggaaccatcacagccatcggactttcaaaatccagaaaggtgctgaaggagatggtccttaccatcaataactttccaattctgaatccggagatcgtaaccgcgattggtctgatgctgctgttttcttcgctgggaatgacgaaaggctatctgaccatgctgctggcacatatcgcattctgtacgccctatgtgatcaccagtgtatatccgaaggtacgaagcctggatccgaaccttgccaatgcagccatggatcttggtgcaacgccatatcaggcacttaccaaggttatcgtgcccatgatcaaagaagggatttttgcgggagcgctcctggcctttaccatgtcctttgacgatttcgtaatttcctactttgtttccggaaacggagtaaaaaatatatccattgttgtatataatatgacaaagcgcatcaatcccaccatcaacgccctttctactattgtgattgtggtcattgtactggtgcttctttttgcaaatctgatcatgccgaagcttcaggcctccaccgtgaaaaaaatggatccgaaaaaaagaaggatcgttgcgattgtcacagctgctgcggttgttctggtattgggaaagtggacgattgtaagccagggaaaccacgtgcttcgtgtatataatgccggagaatatatggacctgagtcttctggacaaatttgagaagcagtataactgtactgttgtatatgaaacctttgagtccaatgagatgatgtacaccaagctggccagtggtgaaacctacgatgttctggttccgtcagattatatgattgaaagactgatcaaggaggaatatcttcaggcccttgactggaaaaagatcccaaacagcaaaaatcttcttcccgaggtacagaataaggactatgatccgggaaatcgttattcctgtccgtatttctggggaactgtaggaatcctttataataagaatgtagtctctcaggaggatcttgacaaagagggctggaatattctctgcgatgaaaaatataagggagatctttatatgtatgattccgaaagggattcctttatgatcgccctgaaagcgctgggatattccatgaacacaaaaaatcttgatgagatccagcaggcttatgagtggctgatccggcagagagataccatggatccgatctatgcaggtgatgatgtgatcgacaacatgatctcaggaaacaaggcaatggcggttgtttattccggagatgcttcctatattatcagcgaaaatccggagcttggctattatactccgcagcagggaaccaatacctggtatgatgccatggtcatcaccaaggactgtaatgaagtagatctggctcatgagttcatcaattttatgttggatgatgaaaatgctctttccaataccgaagaagtaggatatacttctactgtaaagagtgcattcgaggagatgaagaacggaacttatgagggaatttcttcctatattccgcagatcgacaatccaaagaatgagatcttcggataccagaagccaaagatcaagcagaaattcgcagagctttggacaaaggtaaaagcaaaataacaagacgtcagagagagacatgaaggaggttctatgaaatcaaaaaaagcagcagcgatcatgttatgtgcggtacttggaacatctatgataacaggtgtcagtgtcagtgcaaaggataaggatgaactggtactttatacatgggacggaatgtttccgcaggaagtgttggatgattttgaaaaagaaacagggaccaaggtggtatattccaactttgataccgatgagaccatgcttgagaagctttcccaggcaaagggcggcgattacgatgtggtaattgcagatgattacattatcgacagcgcggtaaaagagggacttgtccagaagatcgacaaggataccgtttccaattttaagaacatcaaccccctttatcagggacagttttatgatccggatgacgaatatacagtaccttacggagcaggaatcccactgatcgtttatgatccggagcaggtagatatcgacattaaaggatacaaggatctctgggataagtctctggaggacagcattgccatcgtaggtaattaccgcgtgatctgtggcatcacacagctttccatgggagagagcatgaacgaagaagatgtagccgtgatcgacaaaaccggtgagaagctgaaagagctggcaccgaacattcgtatgatccaggatgacaatacacagaatgcccttctcaacggagaggcaagtgtggcatttctttatacatcacaggtaacacaggcactgaaggataatccggatcttaaggtggtttatccggaggaaggtcttggatttggtattatgggaatgtttgtgccaagtgaagcaccgaatgcgaaggctgccaatgaatttatcaactatatcctggagccggaagtatctgcacagtgcatcaactatatcggatactacaatacaaacaaggcagcagatgatctggtagacgagagcctggttgttccggacagcgtgacaaagggtgaaatcgtacagaatgtaagccaggaagcagagcaggaatacaataagatctggacagagtttaaagctgcctgcgattaagcagacgaaccagtaagggggtttttcaggtggagatatacaaaggcacatccgctttttccggaatagccattggaaaaatactgtattaccacagaggcgaatatcagatccgtcagtccatggtagacaatgtaaaaaaggagctggatcgtctggataatgcaagaacagcggtaaagaaccagatccagcatatgtataaaaacggagcacctctccccaaagagcaggagctgaccttgaaacgtcagctgaagctcttaagtggcggcagcttccagcgggccgtggaaagcatgatcacgacagaaaaggtcagtgcagcttacgcagtccagacaaccagggatgagcttgcaaatgtgttccgcaagctggaggacgaggctgtcaaagaacagatcgaaaatatcagggagatctccgagctgctgatcggcgccatgggtggctcccatgcacggatcaatctgggagatgagccggtgatccttgcagcagagcagctttctcccaatgaacttctggagatgaacaaagccagtcttctggcggtagtcatgcatcaggggtctgttatttcccatgtatcgatcatggcaaaatccatggaagtccccaccctggtcgaggtggagatacagaaagaatgggatggccatatggctattgtagacgggtatacaggaacactgtatatcgatccggagccggagcttcttaaggaatatgagatccgtcatgcagcagataaggaagagcgggaagaacttttgagacttcggaaccagaaggatatcacagccgatggcaaggagatcaagcttctggcaaacatcggaaatctggatgatctgaatacggttctttattacggagcagcaggtatcggccttcttcgaagtgaattccagtatctcggaagagagaattatccaagagagaatgagctgttccgtgcctataaaaaagtagccgaggatatggatgaacgtccggcagtgatccgtaccgtggacctgggggcagaccgtcaggcagaatatatggcaattcctgatgaggtcaatcctatgatgggaaaccgcggcatccgcctctgccttgatcgcaaaaaaatgttcaaagcgcagcttcgggctatttaccgtgcaagtgcctatggaaatatcaacctgatgtatccgatgatcacgtccgaggatgaactggatgagatcgagaagctgatccgtgaggtaaaaaagggcctggatgagaagaacattccttacaaaaacatccgtaccggaattatgatcgagacaccggcagcggtcatgatcagtgaagaacttggaaaacgtgtggattttctgagcctaggaaccaatgacctgacccagtataccctggctatggaccggcagaatcttcttttgaaggataaatacaatgatcatcatccggcgcttgtaaagatgatccgcatggtaacagaggcaggacataagtcaggatgtgaagtttacatatgcggagagctggcagcagattccaatcttacagaagcttttatccagatgggagtggatggcctttccgttgttcctgcctgtgtacttccagtgcgaaaagcgatccgtagctcctatgcggatgaggcaaaccggccggaagaagcagtaaaagagaaataatatccggaaaaataaaaatcctgagaatttctatgttgctatctgttgatatctcacataggatcctcaggattttttgacggaatctttcactcacggcttattgctgttctaaattgaagcagtgcgtggaagcatatctgttccggttaaagttatcgaagtccaagcacctgggcggtttccgaaataaactccggtgtggtaccacagcatccgccgatcacggaagcaccgttgtccaccagcaccttcatataacctgcaaaatccgcaggggtcatgctgtaaactgcatttccaagatcatcgatctggggcattcccgcattgggtttggcaatgaccggaatggaaacgttttctttgatattgcggataaccgataccagctggtccgggccaaccgagcagttgatgccgacagcgtctgcacctgcagcttccagggacatggcagcctctatggcatttccgccgctgaagatacttccgtctgcttctacagtcacggtacagatgataggaagctcgcagacactctggcaggcgtctacagcagccagtgtctcctcgatattgatcatggtttccgctacgatcaggtccacacctgcatcacggagatagccgatctgttcctgatagacttcgaaggctttttcgtaagtcatgtcaccggccggtgccatcatcttgcctgtggtggtgatatcacctgctacgaaaacaccctccggtgcgatctcctttgaatagccggccagggtatgattgatctgttcaatctgatcctccagtccatgcatagtgaggttaatgcggtttcctccgaaggtaggtgcatagatgatatggcttcccgcttcgatgtatgccttctgcagagactggatcacatccttgtgctcaagcacccagctctctgtgcagacaccacgcggcatgccggccttcatcaggttggagccggtagcaccatccagcagcaggacatgatcttcggtcagtttctgaaattcctgttttgtcatatgtttatatcctccttatggcagccaatcacggttggcaaaaaatagggctcctcctgtaaccgctgcactcattgccgtgggtttattttaacacagggaataaaaataatctatcctgtttctgggacgggaaataaaaaataataaaaattaggcaaattgtacatatttaacgacttttctgtcgaataaagaacttgcgtattagaaaataggattgtataataacctatagacatgcccaaagggcaagactgtcatcagatagaacataaaggtaaaggtgaaaaggaattatgattaaagttaaactgagcaactggaagtctgatcaccagatggatgaggcttataaagctctgcgaacaaatatccagttctgcggagcagataagaaagtgatcgcacttaccagctgtactcctaatgagggaaagagcagtgtggcatttaatcttgctgcctctcttgctgagagcggcaaatcagtgcttctgatcgatgccgatctgcgtaaatccgttttgatgggacgtgtgacagtagaccaggaggtaatgggacttgctcattatctttccaagcaggccaagctttctgacgtgatctgtgccactacacttccgaagttccatattatcttctccggtatcgtacctccgaacccggcagagcttctcggaaacagactcttcaaggatatgatccgcgtggtaagagatgtttatgattacgttattgtagatacaccgccgcttggactgatcatcgacagtgctatcatagcagattcctgcgacggatctgtaatcgtcgttgaatccggtaccatcagctaccgttttgtacaggaagtaagagatcagcttgccaagagcaactgcccgatcctgggaaccatcctgaacaaggtggactacagcaaggccggcaattacggtcactatggcaagtatggtaaatacggcaagtacggtaagtatggttcctacggagattatggtgagagcagcagtaaataaaaaaacattgacaacagaaatgagtgggttattttaatgaagggactttatgatattcattgtcatatcctccccggggtggatgacggtgcaagaaacatggaagaatcactctggatgctcaacaaggagtatcaggagggcgtacgtcatgtgatcctgacaccacatttccggtacgatatgtttgagccgcatatgaacattgtgacaagacagttcatgcagctgcgtagagcagccatgaatattggtgatgaaggcatgagactttatctgggctgtgaactccattccagtatggatatggtggaatgccttaagaagggacggcggcttacccttgcaggttccagatatgtgcttgtggaattcagcaacggagatgagaaaaattatattgaagaacgggtcagaagtcttctgatgaatggttttatcccgatcatcgctcatgtggaacgttataaggctacccggaacgatattggatttttgacagagctgaaggatatgggagcacatatccaggtcaacgcagataccatcagcggtcaggacggattcggggcaaaaacctttgcacggaaagtcatgaagcatgggcttctggattttgtcggttctgacggacaccgtaagacggagcgtatcccggagatcggcaaatgtgtcgccaaaatggaaaaaacaatggggagcgaatatgtaaagaagatctttatcaaaaatccccggaaaatcacagggtaatggagaaaagaaatggaaaatcagactgttaacaacaacgacgaagtagagatcgatcttggtgaggtatttcacctgttactgagcaagctgggtgttatcattttatccggtattgttttctgcctggcagctgttatgggaaccatgcttctgatcacaccgaagtatgaatccacaaccaagatcgtggtactgtccaagcaggacagcagcacactgaccaatcaggatatccagacaagtacatcactgaccaaggactatgcggagctgatcaagagccgtacagttactgagggtgtgatcgcacagctgaaactggatatgacacatgaggagcttcttaagaagctttccgtagatacaccaacggatacacgagtagtatccatcacagttacagataccgatccttatacagcggcacagatcgcaaacgcagtaagagatattgcttccaagcatatccagcaggttatggatatcaaggcagtaaatgtggtagagacagcaaacatcccggatgagccgtcaagcccaagcgtaccgaaaaacggtgtgatcggtggacttctgggtatccttctggcagcagccgttgtgctcatcgtatatctgacaaacgatactgtaaagacaccggaagacgtagagaaatatcttggattaagcgtacttggtacaatcccatactcttccaaaatgggcaagaaatccaaaaagaaaaagaaacgtcacgcataaaaataacaacaacggatcaaagtgttgggaaaggccgggagcagcaaaaatatgaagaaattttttgtgtttttattagtggtcatctgccttggtatgggagctggtgtagtatacatgaagagctccgaggataatgaaggaccgaagatcacatttgaagagggaaaagatacgaattatacatccgatatgacagaagaggatcttctgaaggatgtaaaggcacaggatgacagagatggagatgttacagagtctcttactgtagaaaccatatatccgaagaatgacggaaaacaggtttctgttatctttgttgcaaaggacaaaaacaacaatgtaacaaaaaaagaatttaccatggaagctcaggacggcagtgccgaaaatccgcagctgggactgattgataatgacggtctcacagaggacggagattccacagacaccacagagcctgcagaagagacagatatgcaggatgggacagaagcagacagcacagatgctgaaagcggagattccgcagaaggagaactgactccggaggaacaggcgcagaagacacaggaagacaagattgagcagctctctccgcaggatccaaagatgtatttgactacctattacgtagaggtaccggtaggaactacgctggataaattaagctatgtaaaggatatccaggatgatacagagtcaaccagtgatcttttcaaaaggatccagatcaccggtgatgtaaatacagctgcaccgggaacttacgagcttacatattatgtagtagacaacagtggaaacagctccaacggagccgtacttaccattgtcgtgaaataaatatcatcccctctctaggtgcctgagataccggagaggggataaatgcaacaaaaaatgtaagcgagggaaggcgtagaaaagaatatgtatcaaaaagaaaacagcagttgggtaaaacatgcagattttacgatttgcgatatgttgtgtctgcagcttgcgtttgtacttgcatattggatccgaaacgggatcggtcagccatacgagacagagctgtatcgaaatgtggcagtggtgatgtttcttatccagctgatggtcacattttttaatgaaagcttcagcggagttctgcgaagaggaatgctggtggaactgaagaaaacctttgaacagtgtacactggtctgccttctggtcctggcatatatgtttcttttaagaattggaaacaattattccagaatgatcctgctgatcacctatgtgctttatatctgcttcagctactgcggcagacaggcactgaagaaattcctgaaggatcacagatacgaagaaagcgagaagcgatccctgctgatcgttacagtcagtgaaaatgcagacaatgtggtggaaaccatccgcaagaataattacggaacctatcatctggcaggaatcgtctttatggattgtgacaagaagggtgcatccgtctgtggagtaccggtagtagccgggagtgaggatatgatctcctatatccataagaactggatcgatgaagtattttttgcagtgcctaaggaaatcccgatcccggagcagatgatcaaggattgctctgcaatgggagttgtcatccatatgagactggcaactatgaaatctcttggcaagaaccaggtggtggaggagcttggcggatacactgtgctttccagcagtatccacattgtgacaccgcgccagatgtttgtgaaacgagctatggatatcgcaggcggtctggtaggttgtctttttacaggaatcgcagcgatctttctggttccggccattaagatcaaatctccgggtcctgcatttttctcacaggtccgcatgggaaagaacggtcgtccgttcaagatctataaattccgctccatgtatatggatgcagaagaacgcaaaaaagaactgatgaaacagaataacataaaagatggaatgatgttcaaaatggatgatgatccacgaatcatcaaaggagtaggacattttatccgaaagacatccctggatgaatttccacagttctggaatattctgaaaggagatatgagtcttgtaggaaccagaccgccgacaatggatgagtgggagaagtatgagcttcaccatcgcaaacgtctggccatcaagccgggacttaccggtatgtggcaggtaagcggtcgaagtgatattacagatttcgaggaagtcgtagagcttgacacaaagtacattgccgaatggtgtctgaagctggatatagagatcctggttaagacagttatggtcgttttccgcggaagcggcgccaaatgatccatacatattgagattcgaatataatgacccgggctgcggagacgcagttcggggataaaaataaattagataagttataaatataaaagaggaagtaaaaaaatgcagattttattgatcatgctgatcgtaatattccttgcgttctcggtcctgcttctggcactggcaaaacaaagtcccagggaaaagcagacagaagacaaagagcaggaagaatacatcagggattatgcagaaacagtaagacagaccggaggaagtatgaagaagttagaacattggaaagtaattgcgatatatctgatcatctatgacatgatagctgttaatttttcttattttatggcgctgctggtgagattcgattttcggtattcctcgatccccacagactattttgccgcatggaggagttttgcaccaatctataccattatcatcctggtagtgttcggatgcatgcatctgtataacagtgtatggcgtttcgcaagcttccatgagctgatcaagatcacggtagcaactgtgatcactggcgttctgcatattgtgggtatcacgatcttctgggaacggatgccggcttcctattatctgatcggtatcatgctgcagtttttcctgactgtaggcgtacgtttctcctatcgttttgtacttcttgagcggaaccgcagagaaaagagcgagcgtgaggagcggagcaaaaacgtgatgatcatcggtgcaggagaagcgggcaggaccattgtccgggagcttcagaatgcaaaggaaaccaattccagagtacgctgcctgatcgatgacaatccgaataaatggggaagatacatggaaggcgttccggtggtaggtggaagagacgatatttttctcaatgtggacaagtatcatatcaatcagatccttcttgcgatcccgacggcaacaccgcatcaaaagcgggatatcctgaacatctgcaaggaaaccggctgcgagctgaagcagcttcctggtgtatatcagcttgtaaacggagaagtatccctgagcaagatgaaaaaagtagcagtggaggatcttcttggacgagacaccatcaaagtcaacatgtcagagatctttcagtatctgaagggcaaaaggatcctggtaacaggaggcggcggttctatcggaagcgagctctgccgtcagatcgcaggtcatgagccggagcttctggtgatcttcgatatttatgaaaataacgcttacgacattgagcaggaactgaaggccagttatccgaacctgaacctgaaggtactgatcggctccgtccgcgacagcaaaaggatcaactgggtatttgaaacctacaagccggagatcgtatatcatgcagccgcacataagcacgtaccgctgatggagaacagcccctgtgaggcgatcaagaacaatgtggtaggaacctataagactgcatatgcggcaatgatgaacggctgccagcgatttgtgctgatcagtaccgataaggccgtaaacccgaccaacatcatgggcgccagcaaacgactctgcgaaatggtagtccagagcatgaacatggtcagccacaacggacacaccgactggctgctacgacttggcggacacagaaaggataccctggatgcacttcacgacaacgaaggtcaggcatatgtaagtgcaaaccatacatcgaaaacaggaaccggcacagaattcgtagctgtacgattcggaaacgttctcggcagcaacggaagtgtgatcccgctgttcaagcgccagattgaaaaaggcggccctgtcaccgtcacacatccggacatcatccgctactttatgactatcccggaggccgtaagccttgtcctccaggcaggaacctacgccaaaggcggagagatcttcgtcctggacatgggagccccggtaaagatcgacacccttgcccgaaacctgattaagctttccggctacaccccggatgtagacatcaaagtcacctacaccggtctccgcccaggcgaaaagctttacgaagaaaagctgatggccgaagaaggcatggagaaaactccaaacgacctcatccacatcggcaaacccatcgaaatggacgtacaggaattcttcaaacagctggaagtcctggcagcatacggctacgccaacagcgaaaagatccgagacatcgtagccgcgatcgtaccgacctatcactctgcggattccgacctgaagctgcataagaaggtgtatgaggaactgatgagtgaggcggctgtggctgcggagaagaactgataactgatcaataatttacatatatacgaaaaacgaaggagtgttgaaaaaatgaaaatcccattttcaccgcctgatattacagaggcagagatcgaacaggtagcagaagctttaagatccggatggatcacaacaggaccgaaaacaaaagaactggaaagagaagttgcggatttatgcggcaccaatagagctgtatgcctgaattcgcagactgcatgtgcggaaatgacacttcgtcttctgggaatccacgaaggcgatgaagtgatcacttgcgcttatacctataccgcaagtgcatcggtggtgtgtcatgtcggggcaaagctggttcttattgatacacaggaaaattctctggaaatggattatgacaagctggcagaagctattacagaaaaaacaaaagtgattattccggtggatcttggcggagtgccatgcgactatgacaggattttttctatcgtagaagagaaaaagaagcttttccatccagacaataagcttcaggaggcaatcggaagagtcattgtaatggcagatgcagcccatgcatttggtgcgacatggcatggaaaaccagtgggcagcattgcggatttttcaaacttcagcttccatgcagtgaaaaactttacgacagcggaaggcggcgctgtggcatggagagatatcgaaggaattgataatgaagaaatctatcatcagtatcagctgttatcacttcatggtcagtcaaaggatgcccttgcaaaaacacagcttggcgcctgggagtatgacatcatcggaccttggtttaaatgcaatatgaccgatgtagttgccggaatcggactggcgcagatgaaacggtataaaggtctccttgcacgaagaaaagagatcatcagcagatatgatgcagcatttaaaccacttggcatcaaagtactggatcattacaacgaagagcatcagtcctccggacacctgtacatcaccagaatcccgggaatcactctggagcagagacacgagattatcgtcaaaatggcagaaaaaggtgttgcctgcaacgtacattacaaaccactgccaatgatgactgcttataaaaatatgggatttgatatcaaggattacccgaatgcttataagcgatttgaaaatgagatcacattgccgctgcatacgaagttgacggatgaggaagtggagtatgtgattgagatgtttttggggattgtgaaggaatatattaaatgaaaaaaatcatgattttgggagcaagtatattacagcttccagcgataaaaaaggcaaaggaaatggggctggaagttgtagttgtcgatatgaatcccgacgcagtaggctttcagacagaaggaatcgaaaaagaaatcataagcacgattgatatacctgagatagtgaaagctgcaaaaagacattctattgatggaatcatgacacttgctacagatatgccaatgagagcagtggcagcagtggcaagggaaatgaatttgattggaattagtgcagatacagctgtgaaagcaacaaataaagcggaaatgcggaaggcactgaaaaaagcaggtgttccgattcctgtattttacaaagtatctactaaagaagaatatttggaagcagtaggaaaaataaaagaagcaggttatcgatgtattataaaaccggcagataattcgggaagccggggaatcaatctgcttaaagattatgacagtgaaactgtggaaaaggcttataactacagtaaggaatcttcaaggtccggagatctcatggttgaagagtatatggaagggccagaggtaagtgtagaaactttaagtgtcaacggcgtatgctatgttattcagattacagataagctgacaacagatgcaccatattttgtagaaatgggacattcacagccatcaggtcatacagaagaaataaagaagcagatagcgaaggtggctattgcagcgaatcacgcaatcggtatttcaaatggaccgtcccatacagaaatcaaaataacgaaggatggacctaaagttgtagaactgggagcacggctgggaggagacaatattacgacttatcttacacctctttccacaggtgtagatatggttgaaagttgtatacgaattgcacttggtgaaactgcagacttagagcctaaatttcataaagcatctgctataagatattttagagttgagcaaggtttcattagagatatcaggggacttgaagaagccagaaagattccaggtgtaaaacagatttatgttgtacatgggatcggggaaaaaatgaatggcataaagagtagtggagatcgcagcggctttgtaatcgctcaggcagatacagctgaagaggctgtagaaatatgtgaaaaagcgctggatttaatagaaatagaaatggagtaagggaagtataaattcatgtatgaaagatacataaaaagaggtttggatgttatatttgcagtcattgcactgccaatcgtattagtagtctgtattatttttggggcactgatctggctggaggacagaggaacaattttttatctggcaaagagaaggggaaaagacgggacaatctttaatatgtataagcttcgttccatgaaggtaaatgcgccagatattagaaataaggataattcaacttttaacagtgcagatgatccaagagtaacaaaaatcggaaagctgatgagaaaaatttcagttgatgagctaccgcaggtatttaatattctgaaaggagacatgagctggatcggaccaaggccagtaacaacagacagaccattgtctgagtatgaccagaaaagaaaagatcgtttaaaagtaaaaccaggcattacagggtatacacaggcctattatcgaaataatatttcgcaggaggacaaactggctttggatgcaaaatatgcacaaaaagtaacatttctgggagatttgaagattttctttaaaacaattgaaactgtagtatgcagaaaaaatgtttatacaaattagaagggagaagaaaaaatgggtgttgaaggaaaaagacttttagtattaggtgctggaagaggacagatcggactgtataaagcagcaaaagagatgggaatcacaacaattgcaggaaccatgcctgataataatcctccaggaattcctctggcagatgaagtgtgctttatgaatatcgcaaatcctgatgaggttgctaaaaaagcagcgaagcttaaattggacggagtggctacttgctgtctggatacaggaatttcagctcttggaaaaacttgtgattctttgggcttaacaggacttccggaaaaagcagcaattatgtgtaatgataaatccaaaatgaaaaaagcttttatggaatatggtgtaagtacagcacagtattttgaaatttccaatgaagaggaattaaaaaatgcattggataaaattaaattgccggtgatcattaaagcaacggatttacagggaagcaatggaatttacatagcaaaaacagaaaaagatgcctatgacggatttcatgcagcaatgaaattaacgaaaagaagttattgtattgttgaggaatttattgaaggctgggaatttggcgcacaggcatttgtctataataatgaagtcctttttgtaatgccgcatggcgatgaaacatatatgagtcatactgcagtacctgtaggacattatgttccgttggattgcgatgagaacatccacaaacagacggaagaagctgtaaaaaatgcaatcaaagctttaggattgaataattgtgcagtaaacgtagacttgattttgagagacaataaggtttatgtaattgagcttacaggccgtgtaggtgcaaactgtcttcctgaactggttgagattaactttggaattgaatattacaaaatgattgctgcaatggctgttggagaaaatccgttggagtattggggaaagagaaattccaaaacaacggcaggactggcacgaatgattctttcaacagaagaaagtggaaccctagaagatatcaaatataccggagaaatggatgaagatattctggaaataacattctttaaaaaaacaggagatcagattcgaaaatttgtattttcagcagattgtattggccagattattgtaaaaggatctacattggatgagtgtagagcaaaaatcaataaaatcatgagtaatattgaaataaaactcaaataggagaactgcagtatagctggctgtttataaaaattataaatggccagctgtatacgattttaagaaaagatagaagaggaagattaatgaaaacgctgtatttgcttacaaattcctttccttatggagattgggagccttatttggaaacagaagtaaaatattatgatgactttgatgaagtatatatttttgcattacagattagaaaagaacacttaaaaagaaaaagaactgttggaaacaatgtgaaagtaattccaattatgaaagcgtcaaataaaacctatttattatatagtttcaggactctgacagatattaatttatataaagaatttgcacgcctggtgaaatcacgtagattatctgtgcgaaattttgtaaacatgtttgtttatttcagtcgttctcattatgaagcagatttaatagataaaaaaatgaaaggacatgtgaataaagagtcaatattttattcatatcgttttgaatatcagccatatgtggcaatgttattaaaaaagaaatggaaattgaacagtaagattgtaagcagggcacatcggtatgatctttatgaagaagaacataaagggaattatataccaatgagagagggaattctttcaaaaattgataatatatatccatgttcagatcatggtaccgattatctgagaaaaagatttcctcaatataaacagaaagtgcataccagattcttaggaacaatagatcatggagaaaaggagtatcttttcaatgataaatgttatgaaattgtcagctgttctacagtgacaaaggtaaaaagactggatttattgataaatgcattatctcaaattaagactatcccgattaagtggacacattatggggatggaattttaatggatgaaataaaaaaaatggcaaaagacaaactgagagacaatattcagtatgaatttaaaggaaatgtcagtaacacagaattaatgaaacaatatcaggataaaaattactatgtattcgtgaatgtaagttcatcagaagggattcctgtatcaattatggaagcaacatcttttggaattccgtgcatcgcaacagatgcagggggaacgaaggagataattagggataaagaaaatggggttcttttatctcagaatataacagcaaatgaattgactaaaaaaataacagatttttgcaaattagattcataccaatataaaaaaaatagaaatgatgctagatatttttggaataaaaaatttaatgcagactacaactatcagaaatttataaatgaaataagcaattgaggtaaaaaaatgtttttaagtgtaattgttccatgctataacgtagaaaaagaaatcttgcagagatgcattttaagtgtattaaatcaagaatatatgaactatgagatactcttaattgatgatggaagcgaagagtcgtttcgaagcgaaataagagacattgctcgacttgatgaacgaataaaagttataacacaaagcaatttaggagtatccgctgcaaggaatgaaggcattaaacattctaaaggaaaataccttacatttgtagatgcggatgatgtattagtgccatattttttttcagaagcggtacatttatgtgaaaaagaaaatgtagattttcttattggaggtaatacgttattagataatgaagaattcaatgaagaaaagcaaaaacagattcctataaattatagaattatatcagatatagaaaaagaaagttttaaatgtaattcagttggagagttaaaatattttggaaatatgaaaggatattatggacgaggaccgtggacaagattgataaaaagagagatagctgaaaatactttatttaatactgagttaaaaatgggagaagacatagtatggaatctccaactgttagataagtgtaaaaaaacaatgcttgtagaaagaatatggtatttatattatgtgaataacaattcagcaaatcataagtacaattccaaaatgctttataatatagaaaaagagctgccttgtattagaaaacaaataaattttgaaagtgaaccaatgaaatctgcatttagtattcatattctggatgaactaaaaaaaatttacgattgttatattggaaatacacagtgtgatttgagtagaaaagaaaaaaagataatcaagaaaaaattatattcggagaaaccctggatattcgcaggcaatagagaaaatagaaaatatatgagtaatagaaataaaatgaagagtattttatatcaatatagaatttattttggaattatacatattaaacaaatatgtgaattatataaaaggaaaggaaaataaagatggcttcaaaaacaggcaacaaagtatattataatataatactattgattatattttctattatatctgttattgtttttggaataggaaatacaaatggaatattagcattaaatgcggttatttttatttgctttttttatcttactgtaaaaaatatagatgaaaatatatttatgttttcatttcttgtatgcttttttacatttttattatgtggacagatattgaatcgttttatgaaagtttattattataattttccagatgtaatagagaaacatgtggatgtatgtatttttattagtcttgtaggactatgtataggatattttggcgtaacaagaaaaagaattaaaataaaaaataatatacctaaaattgaatataaaaataaaaaaggttatatgaataatataatccaaatcagcaaaggaatgtattatggctgttatgtgttttggatattaacagttatagatgttgttttatatgtaagacattatggttatacatcgtattacatttcatattcaagtagaataccatggtatgtacgacagattggatattttgcgccgacagcattttatatatttttgtcaacattaccagaaaaaaaggatgctaaagttccaataatgttatatattttatatgcatttttatctttaggaacgggacgaagagtaaattttattacaagtttacttataatttttgcatatgcaatgtgtagaaataaaataaaaccaggtgaaaaaccgtggattggaaaaaaaagtatttgggcaatatgtttatgtgttccaatacttatgggagcaatgtatttatttgaatatattagatctaataattatgtagggcatgcaaatgattattctcctattgtaggcttttttgtaagacaaggtacatctgtaaatgcagtaaagtatgctgagttatataaaaataatttagattctgaagcacactattctttatataatatattgagatggctacaaaatagtccatttaatagcttatttaatttgaatttagatttttcttttggaaatcaatcattaagtactgctttacatggaacatatttagcggattttgtttcctactatgcaaattcatatgggtatgcagttggtactggatacggttcatgttactttgaagaactgtatattgattatggatatataggtgtatttataggaaatattatttacggcttgacttttagattattatccaaaattatatctgatggcaaaaatgtttggaagatagcagttggtctttttatgttaaattctttatttcaggcaccgcgatcaacatttgatgcatttgttggaagattgttatatccagaattttgggctccgataataataatttggggattagcttatttgacttccaaatcgaagcataaaattgtaatttaaaattaagaggaatagttagaaatatgaaaaaaaagtcacttggtctaaatgcattattaaatggtataagaacagttttgaatacattatttccattaattacgtttccatatatttccagagttctttctgttgaaaatgtagggaaatataattttgcattatcagttattcaatattttttactgattgccgcattggggatatcgacatatgcagttagagaaggaacaaaatttcgggatgataaaaaaaagttcagtatatttgctaatgaaatatttacaattaatattatatcaacaataatagcttatattttattagtgtttacagttgcagctgttcctaaatttaaagattatgcggtgataattgctgtgtttagtattgaaattctttttacaacgatcggaacagaatggatttactctatatatgaggaatacgcgtacataacgattcgaagtattatatttaaagtaatttcaattatcttgctgtttttgcttgttaaaaaacctgatgactatattgtatatgcaggaataacagtatttgcaaatgcaggatctaatatattgaattttattcatgctaaaaagtattgttcgttaaaatttgatataggtttggcattaaagagacatctgaaacctattatgattatttttgcatctacagttgcaacaactatttatattaattccgatacgaccatgttaggatttatgggaacagatttcgaagtaggcatatattctgtttcctcaaaaatatataggatcgtaaaacagatgttggcggctattttgattgttacaattccgcggttatcattgttaatgggacaaaaaaggatagaagaatataaaaatattttaactcagatttttaatgtcctggttatgttggtgtttccatcggttaccggattgatattattaagcaaagaagtcgtattattgatttctggaaaagaatatataaaagctacaggttcattgaaattattaagtatagcgcttatattttgtatttttggatggatatataatcagtgtgtattaattccggcgcgtaaggaaaaaatcgtgcttatagcaaccttggttagtgcattagcaaatattgcaataaattttgtttgtatttcattttggagagaaaatgcagtggctttttcaactatagttgcagaagctataatgatgcttgtttgtgtttatgttggacggaaaattgttcgacttaatgcaggcgtagcatataatatttgtacggtttgtgccggatgcattggtatatggatgagctgtaaatttgtaaaacatttttctctttcaagtattgcaacattagtattatctatattattatcgtgtattgtatatggaatgtgtcttatattgatgagaaataaagttatatgggcattttttaagaaaaaaaataaaagtgaattacattagaatagagtatgaaaatgctcaggaagcaaggtacttcctgagcattttctcaaatcatcatttctcccgcaatttcagaacatcttcaagtggcagccctgaaaacctgctgatatcctcaggtgagaacctggaatcctgcagcatgcgttgtgcagtaaataaagcatgttcctgaagaccctggatgcgaccttgggatagaccttcggagcgtgcatcatcgcacatttcctgaacagcctgacacatattaacactcccttctgtttctgtgaaacgtaaattgataccggttatggagtcaatgacccgggctgctttgagctcgagtgaccggaaaccggggctctgtgatgtgagctcctgaagtttccgtttatctttggagtatttaatgaagagcatgacttctttgagattgctctcgagtttgtcaagttcttcatcctttatctcggcaggtgagaagagattgatccggtaatccgggaccagagaaagaatctcggggtcccggacagagagcatttcgtggaggcttctgggagcgttctaggtatcggagccgaagtatacgactacggtgatgaccggaatcagccggtcatctttgtagaagccggtgagatattctccggatgtggagggccattgctttgcttctctgtgggttgtcagccatgtaatctttggtgatggtatcctttgtacccataggtttcaccaccttcgatcttgctatgtgatcagagttattttatcatctgatccattttcggggtaacatagtttattgcttttggaaagaggattttgtgaaaaagcttcagaactgcgcaggtaaagcggatatgtttgtcgaacggagtcgaaataaatcaatagacaaaaagagcgtattgtgctactctgaaagcacgaatcacgtggcaattggcatatttgtatgtgatttttcgcattgaaagggagtggaacgcggaatatgaagagaccgaagctaccggtgggaattgagaattttcaggaaattcgtcaggcggatttttattatgtagataagactaggcttatcgaacaactgatcgatcagtgggggaaagtaaatctttttacgagacctcggcgttttgggaaaacattgaatatgagtatgcttcgttgtttcttcgagatcggggcagatgaagcgctgtttgaaggtctttatatttcccggaaacaagaactgtgtgaacagtatatggggaaatttccggtagtgtttttatcgctgaagaatgttgatggacttacctttgagaatgcacgctatcagctgacagaactggtaggcagagaggccagtcgttttctgtttttattggagagtgacagactgacagaaacggataaagatatatatcgtacattgatctctgtggagaatggccgatattctatggatgaaaatattctttcttctgcgttgcagatattgtctcagctgttgcataagcattatgggcagaagacgatcattcttatagatgaatatgatgttcctctggataaggcttttcagcatggatattataaagaaatggtgctcatgatacgcggtgtgttcggacaggcacttaagactaacgattctctgtattttgcagtattaacagggtgtcttcgcgtgtctaaagagagtatttttacaggacttaataacttcaaagtgctttcgatcacggatcatcgatttgatgagcattttggcttcacagatgatgaggtctgcagattacttacagcatatggcatggaggatcatctttccgaaacaaaggaatggtatgatggatatcattttggaaatacagatgtgtactgcccatgggatgtgatcaatcatgtagattgtctgcgtgggaatccggatgcggagccgctgtcttactggatcaataccagtgggaatgaactggtaaggagatttattgacagggcagataagactacaagagatgagatagagcgtctgatcgcaggtgagtttattgagaaaacggtccgtatggagttgacctatgatgaaattgataacagtctggataatctttggagtgtattatttactacaggatatcttacacaggcagggaagaccgaacggggagtgtatcgtctgaccattccgaacagggagataagagaagtttatgtgcttcagataaaggaatggtttgaccgcgcagtgctgaaagaggcggagccgacgaaaaatctgctgaaagcaataaatgaagggaatgcaggtgagattgaggaacgccttacaaagattctgggaaatacgatcagtatttttgatacaaaaggacgaaatgaagaaaaagaaattttttatcatggacttttgttggggcttttgcgtagtgatccaaactggcttgttcagtctaatgcggaatctggagatggttttgcagatattctggcagaaccggaagatccggatgccgggatcgttatcgagttgaaatattctcagactttttcaggattgcaaaatgcatgtgaaagagcgctggcacagatcagagaaaagcggtacgatgaacggttacgtaatgaaggaagaaataatattctggcgtatggagttgctttttgtaagaagcgatgtaaagtggctgttcagaggctgtaaatctgctggaaatatagataatattattgatgttcatacagaaagataagaacaattctgatcgatctgtatgacacatcaatatataagataagttataaatattaacatacaaaggagagctagaaatgggaaaatattttggtacagatggcttccgtggagaagcgggtgtttcgttgacggcggatcatgcatttaagatcgggcgttttctgggatggtattataatgagctgcgcagaagagcgggggagacggctgcggccaggatcgtgatcggcaaggatacccgacgttccagctatatgtttgagtattcgctggttggcgggctggtggcatccggagcggattcttatcttcttcatgtgacaacaacgccgtctgtggcttatgttgcccgtaccgatggttttgactgcggtattatgatctctgccagccataatccttattatgataacgggattaagctgatcaacggccagggtgagaagatggaagaggagatcatcgctctggtggaggattatctggatgaccgtcttcagctgttcggagagaaatggcatgagattccttttacaaagggcggtgagatcggcaggacggtggattattcggcaggccggaaccgttacataggatatctgatctccctgggagtatattcctttaagggaatgcggattggtctggactgtgccaacggaagtgcatggaatatcgcaaaggcggtttttgatgcgctgggagcgaagacttatgtgatcaatgctgagccggatggtaccaatatcaataacaatgccggttccacccatattgagggtctccaaaagcttgtagtggagaaggggctggatgttggctttgcctacgacggagatgcggatcgttgtctctgtgtggatgagaagggaaatgtggtcagcggggatgcgatcctttatgtgtacggccgttatatgaaggagcgcggaaagcttctcaccaatacggttgtaactacggtaatgtccaattttggcctttacaaggcttttgatgctcttgatattgagtatgcgaagacagcagtaggggataaatatgtttatgaatatatgatgcagaatggctgccgtattggtggtgagcagtccgggcacattattttttccaagtatgcatctaccggggatggcatccttacaagtctgaagatgatggaagttataatggcaaggaagaaaaagctcagtgagcttactgctgatctggcaatctatccccaggttcttgagaacgtgcgtgtccatgacaaggcagtagcgcaggcagatgtggatgtgcaggcagcagtagagagtgtggctgaggcgcttggagacaccggaaggatcctggtgagagaatccggtacagaacctctgcttcgtgttatggttgaggcagagagtgaggagctttgcagaaaatatgtggaccaggtggttgaaatcgtccgtaagaaggggcatgtggcagagtgatgtcctggatgcagaccgcaggtgtctgaagaacggagcagtcagaagaatataaaaatgcaataagaggagaaaaaaatcatgtgtggaattgtaggttttacaggcaggcatcaggcagcacccatccttctggacgggctttccaaactggaatacaggggatatgattccgccggcatcgcagtgcgtgacggggaaaaggatatcgagatcattaaggcgaagggccgtctgaaggtccttctggagaaaacaaacgcaggtgaatctgttccgggtatgtgcgggatcggtcatacccgctgggcaactcacggagaaccatcagaggtcaatgcccatcctcatgtcagtgataacggaaatgtggcagctgtgcataacggcattatcgagaattaccaggagctgaaggagaagcttctccgcaggggatattctttttattcttccacagatacggaggttgctgtgaagctggtggattattattaccagaaatacagcggatctccggttgaggcagtgcgtcatgccatggtgcgtatccgtggttcctatgcgctggcaatgatgttccgtgattatccggaagagatctttgtagcgagaaaagacagccctatgatcctgggtgtggagaatggagaatcctatatcgcatcggatgttcctgcaatcctgaagtatacaagaaatgtttattatatcggaaatctggagctggcatgtgtaaaaccaggtgagatcactttttacaatctggatggtgaggagatcgagaaggagcctaagatcattgaatgggatgcagaggcagcggagaaagccggttttgagcatttcatgatgaaggagatccatgagcagccgaaggcagtcgcagatacactgaattccgttatccgggaggacaagctggatctgacagagatcggtctggatgatgagaggatccgcagcatcagccaggtttatatcgtggcctgcggctctgcttaccatgtgggaatggctgcacagtatgtgatcgaggatcttgcaggtcttccggtgcgtgtggagcttgcttcggagttccgttaccggaagccgcttctggatcctgatggcctggcagtgatcatcagtcagtccggtgagactgcggacagtctggctgcacttcgggaatgtaaggagaaggggatccgcacgctggctattgtcaatgtggtcggctcttccattgcaagagaggcggatcatgtattctacacacttgcaggaccggagatctcggtcgctaccaccaaggcgtacagtacacagctgatcgcttcctatgtgctggcattgcagatggcactggtccgcggaaagatctcagaggagcagtgtgagtcctacattaaggaactgaagacacttccggacaagatcggcaggatcatcgaggataaggaaaggcttcagtggtttgcctccaagcaggccaatgcaaaggatatcttttttatcggaagagggatcgattatgccatcagccttgagggcagccttaagatgaaggagatcagctacatccattctgaggcgtatgcggctggcgagctgaagcatggcaccatttccctgatcgaggacggcactcttgtgatcggtgtcctgacacagccggagctttatgagaaaacagtcagcaacatggtggagtgcaggagccgtggggcgtatctgatggggcttactacgtttggaaactataatatcgaggatactgcagattttacggtttatatcccgaaaacagatccgcattttgcaacttctctggcagtgatcccgttgcagcttctgggctactatgtcagtgtaaataaaggtctggatgtggataagccgagaaatcttgctaagagtgttaccgtggaataaggatatctgtttcatggaaggaacattttagaggcagttccgtgacatcgtgagagcataaaagaatcatgatatcacggaactgtttttgcatttggcgatttacgatatttcttgcttttatcagtaaaaaagcgtaaaatgattaggatatttgaatctgtacagagagtgtccatatgaaatattctctgtaccatcaaaaatggaggattgcatatgagaaaaatgggaaaacatatcccagggctgatcgtgacgcttgtggttctgatcacagcaatcgtatttgcggtcatgcttctgaatatgaaggtgatcccgacgaagttcattgcagtgatcggactggtaatgctggtcctgatcgtgatcgtcggagcgcttgtatggagtacggatggtaagataagatttgtagtgggagtgatcctggcagcagtttttgcagcagtattcattctcggaagtatgtatgtttataagacacattccacactggcagggatttccggtgtgaacacagaggttacggaggtcggcatttatgtccgtgcagatgattctgcagattccatagaggctacagcagattatgtgtatggtgtgctgacagatcttgacagagccaattcggacaaggctatccaggaggtggattccgagacaggcaagactgtgcaggtccaggagtatgcaggacttacagagctggttgacggtcttctgaacggacagacaggtgcgatcgtgctgaacagcgcatatttaagcgttattgaagagatggatggatattccgatatttcttccaggatcaaagagctgaccgtgaagaaggtggagacgaccattgagccccaggagacagaggcgaaggctgaagagaataccaatgacggttctatatataccatctttatcagtggtatcgacagccgcagcggccttgttgcaaagagccgaagcgattccaatatcattgctacggtaaatacagctaccagacaggtgcttctggtttccacacctcgtgattattttgtaccgctttctatttcaggcggacagagagataagctgacacatgcaggtatctatggtatcaatgtatgtatggatactctgggaatgctttacaacgaggatatcaactattatttccgtatcaactttgcgggatttgagcagctgatcaattcgcttggcggagttactgtttattctgactatgactttgattccaagaatgagacaggatatcacttcaatcagggagagaactacctgaacggtgagcaggctctggtattcagccgtgagcgttatgcctttaaagagggcgaccgtcagcgtggcaagaaccagatggcagtgatcaagggtgtgatcaacaaggctctttcaccggagcttctgaagaattattcttctgttctttccagcatccagggatgctttgagaccaatatctcctacgaggagatcgccagactgctccagcagcagctgaacaacggcggtgactggaacatcgtaagctacagtgtaaatggtaccggtgacacacagaagccgtattctatgagccagaaggcttacgttatgattccggatgagtctaccgttcagaaggcggaggccatgatgaagaaggttcgtgacggagagactgtttcccaggaggaggcagacagtgcaacatcagcggcagcagctacggataatgatgcacaggcagctgcagagggaagtacagcagaagcgcagggtgagactgcagctgccacacaggatggcacagcagatgcccagagtgcagacggaactgttgcacagcagtaagataaaattattaaattttagcataagaacagccggggaagcgtaaagctttccaccggctgttttttcatgagaaacagaacgaaaaaaaatccaccggcgatcaccgatggatttttttttacaggatctctttcagatatctttccagggcatcctgccatgttggaagtggctgaaagccgttttttacaagcttggatttatccaggcggctgttgaatggacgtacagccttggaaacgccgtactctgcagttgtgacaggagatacctctactttttcgtattccttgtggccgagggcagcagcctggcggaagatctctttagtgaaatcataccagctgatgaagccgccttcgttggttgcgtgatagtagccgtatttctctgtctcgaccatgtctaccagaagacgtgcaaggtcgtaggtgtaggtcggagttccgatctggtcactgactacggtaagcttgtcatgggtttttcccagatttaccatggtacggataaagtttttgccgtttttgccgaatacccatgcaatacgtacgataaagaatttatctacagtgccggatactgccagttcaccgtcaagcttggtctgaccgtatacgttctgtggagcgtagtccttgcagtctggatcccatggtgtggttccctggccgtcaaaaacgtagtctgtggaaatatacatcatcttgatgccaagctccttgcagatgtccgcaatgttctgtgttcctacaacattgacaagacgtaccttctcacggttttcctcgtcctctgcagcgtctacggctgtccatgcggcacagtgtaccactgcatcaggctttacctcacggatggtttttgctaccgcttctttatctgtgatatcaagctgcacataaggcatggtggtaacaggagtaccatcagcgatgccgctgtaggaaggagcaatgtcacttcctacgccttcatgtccacggccggacagttcattcattacgtcatggccaagctggccgccaacacctgttacgaaaaatctcatgctttaacctcctcgcggtttccatacattttttcgtagtagttctgatactcaccggagatgatagtttcccaccattccttgttgtcaaggtaccatttgatggtctttttgattccgtctgcgaattttgtttcaggaagccatccaagctcgttgtggatcttggtcgggtcgatagcgtagcgcatgtcatggcctttacggtctgctacatgtgtgatcaggctttccggtttgccaagctccttgcagatcagttttacgatatcgatgtttttcatctcgttatgtccgcctacattgtaaacctcgcctacacgtcctttgtggatgatcaggtcgatggcacggcagtgatcctcaacatagagccagtcgcggacattttcaccctttccgtaaaccgggagtggtttgtcgttcagagcgttggcgatcatcagcgggatcagcttttccgggaagtgatacgggccgtagttgttggagcagcggctgatggtcacaggcaggccgtaggttctgtggtatgcgagaacaagaaggtcagcacctgctttagaggagctgtacgggctgcttgtatggatcggagtttcctctgtgaagaagaggtccggtctgtcaagaggaagatccccgtaaacctcatctgtggaaacctgatgataacgctggattccgtatttacggcaggcatccatgagaacagcagtacccttgatgttggtgtcaaggaatacctccgggttttcgatggaacggtctacgtggctctcagctgcgaagtttaccacgatgtccggatgttcctcctcgaaaagcttgtaaacagcgtcacggtctgtgatgctttcctttacgaagcggaagttcggtttgtccatgaccggtgcaagagtggaaaggtttccggcataggtcaggcagtccaggcatacgatacggtaatccggatgagcctccatcatatgaaaaataaagttgcttccgataaatccggcgccgccggtaacgatgattgtcataaaaaatctcctttataataaatgattgatcttatacggattccgtcgaaacggagtccgcaggtaaatgcagtgtcggaaaatcagatcggcttagtgaagcgcgtccagatattttccgtccagaacatccttgagatactggccatactggtttttcttaaggatttcgtaaaccttgagcacgtcctcctttgtgatccagccatttaagtaagcaatctcctcaaggcaggcgatcttgcggtgctgatgctgctccatggtttttacgaagttggttgcctctacaaggctttcgtgtgtaccggtatccagccatgtgaagccctggcccagaagctcaacgttcagctgtcccttctcaaggtagatacggttcaggtcagtgatctcaagctcgcctcttgcgcttggcttcagattttttgcgtactctacaaccttgttgtcgtagaagtagagaccggttacacagtagttgctttttggcttttccggtttctcttcaatggaaacagcttttccgttctggtcgaattccacgatgccgaaacgctccggatcatctacatagtatccgaaaacagtggcacctttgcctgtttctgcattgtctacagcagctttcaggcgctttttgaggccatgtcctgcgaagatgttgtcaccaaggaccatacatacggtgtcgttgccgatgaattcctcgccgatgataaatgcctgggcaagtccgtccgggcttggctgtacagcgtaggtaaggttgacaccgaactgatggccgtcaccgagaagctcctcaaatctcggggtatcctgcggggtggagatgatcaggatatcacggatgcctgcgttcataagaacagacataggatagtagatcatcggtttgtcaaagatcggcagaagctgtttggaggtcaccatggtaagcgggtaaagacgtgttccggagcctccggctaaaataattcctttcatatgttttctcctttgcgtgatgatgtgcagcataagtcgtgcctgcacataactttgttactgtaactgtattataaaaggtgacgcaaggtcaccttcaagagcttttttcatattttttatttttggctatttttcacaaagaaatacgccggcatccttggtaatgcggaatcctttggcagtttttctggcggtgtaggcccggaattccttgtaacggtccaatatatactgattctggttgccgtggcaggagaggacgtaggagatcagcggctccgcatcctggaccagaaggcagtcttcataagaaagccactgagcctttgggaaaaaaggcgccaggatactctggccgttttcacgtccgaaccgttcataaagccggtctgcggaaagcacgatccgttcatcaaaatcctgcaccagctggctgacctcctgcatatgtgcctttccgtaagcactgcagagaaatcttccgccgggagcgaggacacggcggacttccttcaggacggagggaatatcatcgcagtaaaaaagcacgtgattggcgatcaccagatcaaagctttcgtccttgcaggggatttttcggcagtcaaaggcccggaatgcaaaccgggtatccgaggaaccgatggctcgtctggcatcgcggagcataccgctggaaatatcggaaagtgtgatggagatatcctccggcagaagggagaggttgtcggtccataacgttccgtccccgcagcccagctccagaatacgaagaccaggtgagatccggcactgctcaaagatccagggaaaccatccctgtttgttctgggagtacaggctgtggagattgatcctggaggaaatgttggtggcattctgatactgattcttgaggcttttttccatgccggtcaggtggatcaggttcagcatctggctccagtcaatggtgtgctgttcctttatcatctgtgcggtatcctggatcgctttttccaccagctgcatctgttcgatccggtcacggaccagacgaagctggatattcagagaattcagcatgaaatgataatcggaatcaccgatggtcatttcacggatgtcatccagggaaaagcccaggtatttcagaaggaggatctgctgaagccttgcaaaatcctcgtctgtataaaaacgtgcgccggattcggtgacgagagagggtttcaggatatcctgtttatcataatagcggacagtacgcagagttacgtgtgccatgcgggcaaattcgccggaagaatagtagccgtcttttttcataaaaaatagaatcctttctgaggaaataacaaacatcctgtcatagaagtcataaaagaattataattcagatccggaagccgtacaagagtaaaacgtataagagtaaaccgtacaggagaaaaacagcattgacaaaattctgctggtttgttagtatatcgtttcgaaaaaaagggaaccccggaatcatattttcgggataagcgttcgatataaaaaggagtaatttttatgcgaaaccgtactctggatatggtaaaggcgatctgtgcttatgcagttgtgcttcttcacgtccattttccgggaaatgccggaattatagccaatgtacttgccagatttgcagtacctgtgttttttatggtatccggatatttttgtttccgtggcgatgatacggaatttataagaatcggaaaaaagatccggcatgttctgaagctgatgcttgtggcatttccggtctgctgtctgtgggagctgatccagaaccacatcgacggagcaagccagaaggaatggctggaagccctggtttcgggggaacatatccgccagtttcttctatataataacagctctcaggtgaaatggcatctgtggtttctcccggcactgctctattgttatcttctttttgccctggcagcaagattccggatttgtaagcaggcatatgttctgataccggtgcttcttctgatccatttcggaatggaggaattttcgaccttcctgttcccggaaaagcatttccgtgttatgcagtttcgcaactatctgtttaccggatttccgttttttatgttgggacatctgatacacagatatcaggaaaagctggaagcctgttttgcaggaaaaaaagtgcttcttttgtatggcatggcagctggcggcgggatcgcaagtctgctggaataccggtattttggcaaactggaattgtttctgggttcagtatttatggctgttggcctttttctcattgcgatcatgggaaaaaatcggaaagtgcccgagcttccggtagccatcggtcagaaatatgcattttttatttatctgttccatctctgtgtggcggatatcctgaaggatgtggctgtggcagctggaattgagaaaaatcttttatatctgtggatgagaccggtgatggtctgtgttcttgtgactgctgtggcggtaatgtatggatatggaatgaagatctgccggaaatagaagagtttatggtattttcatatttatgcgctgtgattttgtaccaaaatatgctaaaatatcctttattgataagtcacagcacccacccggaggatgcggggaaagcgactggaatatcccgcttcagggtaaaaaatactgagacatgaaagacaaaggagatttttatggatttacaaaacagagcggaggccggcagtgacggacacgatgagagtgtattgaatccggagatgcccaacgaaactgatctgacgaagaaggaacgccgccggatcgaaagagagaaactgaagggaatgggaacagggaagaagattcagtatatctggatgtattataagatacatatgctgtgtgtgcttcttgccattggcggagtctgcctgggagtgaatatttaccggcacgcacagatgaagacggtgctttccattgcggtggtgaatgcagggaattacgactctgagaaggtggaagaggatgttttgaagacactgggaacagaggataaatatgcagaagtcagtgtggcgcagaatctgatgacggacgagacaggagaggattttgattactatgccaggatcgcatatgtgacggaaatccagagtgctaccgttgatgtcctgatcatgccgaaggaactctatgaacatgagaaagacagcggaatgtatgcagatctcagggaaacgtttggagatgaggtgtttgagtctctgggcgctgtggatgatcagcatctggagcttgacggcagcagtagtgttgctcaggaatttggcctgagatatgatccggtgtgcatctgccttccgggtaatgtgaagaataaggataatgcgttgaaatggatccagtctgttctgaaatgatggatccatatgcttagctgagtacagagataaataaggcctccggttcgtaacacaggaaccggaggccttattatatatgaatattacagtgtatcgttacgtttgatgtagcctggctcatccgcaggacggatgatctccttggcatgcgtgatcttggcatgcttgtctaccaccagattttcgatatggacattctcaccgatggtgcagtctgcaagaactacacagttcttgataacagcgccctttttgatggtacagccacgtccgacaatggaattctctacagttccctcgatcatggagccgttggagataacggagttggaaacattggctgtgtcaaaataatgggtcggacaggagttgttggtgcgtgtatagatcggccagttatcatggaaaagatcggttgcagttttgtagtcgatcagatccatatttgcatcgtgatagctcttgaaatcagtgatcgatgcaaaatatccgcgatgagatataccacgcacatccagctcaccgtctctgcagccggcattgatcacgtctgcaagggtataaagagaggaaatctcttttgccttatggatgaggctgatgaaaagctccttgctcattacgtaggtatccatgaaaatgttgcggttctttgcattgccgtggttgtgctcaatggagagaacacccttctgacggttcaggttcaggatgtggcagttcagatagttctccttggcattatcaacggaatgataaagcatggtcacatctgcaccggattcgatatgggcatcgatcagcttggaatagtcggtggtgtagatcatgtaattcggagcgataacaacatacggataatgaactgcttcgatgcactccagattggagtagtagttgtcgatatcggtgttatagatatcgttgactccggaatgctctgaaaagaggagttggagattaccgctcttggagttgatgttgtagtgacgtccggttccgagatgttctacaagagaacggggtttgttctttacatagacctgaatgtactcaattccgctgttggtcatatttgagatcgggaagtcgatgacacgatatcttccgagaaatgaaaaggcgccgatcgcacggtagtcctgaagcccctccacatggatatttctttctgaggaattcacgattccaaatgctttaaacatattactcagccccctttacacgttttgatacaagttcgatgtgctcactgtccttggaaccgacacgagcattggtaccgatcacgactccgtctgcaacgagagcacgctggacaacggcacctgcttcaacaacaacacccggcatcaggacactgtcgatgatcttggcaccaggaccgaccttgacacctgtgaaaagtacggagttggtgatctcaccttctacaacacagccctgagtaatgaaagcagtgttgatcacagcggtatcacagatatactgtggaagagaggtagcatcctcagtgtagattttccaggtaggatcgttaagatccagttcactgtttggactgagaagatccatgtttgcttcccagagggaatcgatggttcctacatccttccagtagcctttgaacttgtaggcgtagagtgctttgtcctgtgcaaggagtgtagggatgatgtctttaccgaaatcgtgattggaatccggatttttgatatctgccagcaggagcttgcgcagaagcttccagttgaatatgtagatacccatggaggcaagattgctcttcgggtgttccggtttctcttcaaattccacgatgcggtcatcttcaccggtgttcatgataccgaaacggctggcttccttcatgggaacctcgataactgcaatagtcgcatctgccttatgctggatatggtcatcaagcatctttgcataattcatcttatagatgtggtcaccggaaaggatcagaaggtattccgggttctgtgagtcgatgaaatcaatattctgagagatcgcatcagctgttccacggtatacatccagaccggcatcagccttctcacgtggaggaagtacataaactccgctgtccttggcatcaaggccccagcggccaccggctgctacatagctgttcagtaaaactgattcatactgtgtcagtacacctacgacatcaatgccgctgttggcacagttactgagcggaaaatccacgatacggtatttaccgccataaccaacggctggcttggcaactttattcgtcaactcgtgaagacgacttcctcttccaccggccaggatcattgctaacatactgttttgtttcatggcgaatcctcactttcatttcttgtttactgccaggtgtctttaaccataaaaacaataaactttgttaatattatacaccttttaaaaaagaaaatccagttttttgtgcaaaaaaacgttatttttatattgggaaattagacggatttgggaaaattgatggatgatctgtcgaaaaaaagaaacgcttaagaaggttccgggattctgaaaaaacagtaacactgaaaatagccggatttcggatacatcggcgaagattcttgcggaaaatgtgaaagcagtgtattctgtaaaaaaagtccggaatacagcggagaaaggatatcgatatcagacagggagaagacaggatgaaagaagaaagaatttccaactatgtaaaactatgtgaagagtgggcacaacgctttttgaagatggatcaggcagatctgcataaacgggtgccggaactgaaggaagaaaacgggtttctcacgatcattcatttcggaagaagatatggggtgagtctggaagacggcagtatccagagcctggatggacagagagaaccggatactacggagatgctgaatatttatacgcttctggggtatgcgaaagagggggcttttattatggataagtgggtcccttttgcagatctcaggaatgcaagaccatttgcgccggcgtatcagatcggagagacggatgtgttcagtgctacattttccggccatgaaaaggaattgagggaggcgtttcagaagcttgacggcagggaactgccccagggtgatgtgggatatgagatcagggcctttgactgtatgcctatgagattctttttctgggaacgggacgaggagtttgaagcacagggaaatatcctgtttgattacagtgccacagatttcaatcatgtggagagtgcggtatccatagcagattccgggatcaaaaggcttgcggagcttgccggggttccgctcagggggaaatcttttcagatgcgctgataaccgaaatataataaaaccaatatgaaaaataaataatacgaaagataattgcagttatcagaaaaatcgtatataatgaaggaatatttaaggattttgagacagtaactgtcacgaaggatctatgagaaatttacgaatcaggaggtgatgctcgtggggaaaaatgcatcgggaatgtatgtcatagatgaggattataagattatcagctataacctggcagcacgtgagatctatccgcagctgaagaggggcgagaaatgctatcactgtctgagaaacagagaaactccctgtgagatctgtccggtcgttaacgggatcaaaggtccgaagaattatctggaaccgggacggaatatcctgcgttcggttgatgctgtggagattccgctggaatccggcgggacaggacatgcccttgttttttcggatacagagacgaatgatgagatcagcagcggaatgatggagaatccgattcttatggggatcattaatgttctcggaaaaaattttatcaatatctactctgttgacagagagactcataaggtccaggtatgccgcttccaggggcagagtggagcttatggggaggagggacttcgcagggatgaatcctatgagaagatcatggatatttatattgagagcagtgttgcggcagaggacaggatccggatgcatcagatgatggattttgagaagatatgccaacgtcttacaaggattccccagttgatggtacattatcgtgtacgccgaagcaacgggaggattgaatatttctatgtgaaatgtgccagggtaggaacggctgaggattttcagaccgtggtgtttgcttttgccaatgaggatatggatgtacggtacagtgagatggaggccatactggaaccaggaggaacagcatccggaagaaaacttcttattgtagtgaatgacgagacggatcggaaagcgcttacagaacatctggagggcagttttgaggttatctctgcgatgaatgaagcagaggggatgaagcgtctgtctgagaattacaaaaccctttctgcaattcttcttgatatgagtgtgccggtatgtgatgaatttcagtttctggagctgatccgtgatgatgtgatgctgacctctgtgcctgtgatcatcataaccggaagtaaccggttggaggatgaggtgcgatgtctggaactgggagcagtggattttgtacggaaaccgtataatgtccgtatattaaaaagtaagatcaacaatgtgatcaagctgagagagtccgtgatggtactctcagctctggaatatgatgatcttacagggctttatatcagacaggcctttttccatcatgcaaagacgctgatgcgctttaatacgaatcaggattttcatgtggtggtggcagatataaagaactttaaatggatcaacggaacctatggagagaagaccggtgatcaggttcttacctatctgggagatacgtatagaaatcaggttcgctacgggacggtgggcagatatggaggagaccagtttgtagccatcatatatggaaagaaagagatccgtatgacagatatggagaaatttatccacagggtcgagagtggagcaccgattcctaatctggtggtcaactatggggtctatgagaatgtggataagacactgccttttaccctgatctgtgacagggcttttctggccatgaagagtatccgggatgactatgagcaccagatcgctttttatgatgatgagatgagaaagaggcatatccgtaacggacagatggagaatgctttcgtggaggctatacgcaatgaagaattcgtagtctacctgcagccgaaatacagtgtggagacagaagaaatcgttggggcggaggcactggtgcgctggaagagagcggaaggaactatggtttcgccgggagaatttatccctctttttgagaaggatggtctgatcgtacgccttgatgaatatgttttccgaaaggtatgcagcatccagggggaacgtataagatcagggaaaaagatacttccgatttcggtgaatctgtcacgtgccagtatccattacgataatatgatctgtcgttatgtgaagatcgtggaagaaaatggcattccgttttcttctgttcccattgaattgacagaaactgctgcgttgtataatgatcggatcagtaagctcatagagaagatggtggatgcaggattcgagctgcatatggatgattttggctccggctattcatctatgacaagcctgaaccagttgccattcgatactctgaagctggataaaagtctgatcgattacatagagaattttcgtgggcagcaggtgatccgtcataccatttcgctggcacacagccttggaatgaaggttcttgccgagggcgtggagaaagcaaaacaggtggagatcctgcgaagcctgagctgcgatgagatccagggcttttattatgcacggcctttgccgtgggaaaactttgaaacaaaggttataagagcaaaagaggcgtgtaaaaaatgagagatcatttttacacgccctttttacagctaatgcttccggacctgtttttcaataagataaagtgcaaaatacagcagcatggcaatgatgcagaggatcacaatggacatcaggacccatgtaagtctgaatgtctggcttccgtaaatgatcaggtatcccaggccttttcgggcaccgataaattctccgatgatcacgcctaccaggcaaagcccgatgttgaccttcatcacactcaggataagaggaacggaggagggcaggacgatcttcagaagcttttcctttttgtgtccccccagagtttcgatcagcttcagcttttccggatctgcctggcagaaaccggagtacagattgataacggagccgaagatggctacagacatgccggcgactacaatggtacgttcgttggcaccaagccatacgatcagaagaggggccagagcagatttcgggagactgttcagtaccaccagacatggctccaggatccgtgcgatccgtcgggagcaccagagaagtactgcggttcctacacccaggatcacaacaaaaaagaaactgacaagagtttctgccagtgtcacggcaatatgtgcaaacagggactgatccctgcacatggaaagaaaggtctttgcgatcagggaaggactgctgaagataaaggaatcgatccatccaagatcagaggatatttcccaaagtcccataaacagaacaaaaagaagtgtccgtgcagccaggataatgtgtttttcttttttctgccgtgcaagatattgtttctgctgtctggaaatttcaggcattttcattgagctccttccatatgatgttaaaatatttcttaaaatccggagcatttctggaggagaggggagtgcggtcgctgatatccagatcgatatcaatgatctttcgtacagtggcaggacgtgcagaaaggatcagtacccggtcggccatactgatggcttcggagatgtcatgagtgaccaggatcgcaggcttgccggagcttttgaggatttttccgatatcatcactgacatttaagcgtgtctggtaatccagagcggaaaatggttcgtccagaagaaggagctccggttccagcaccagggtccggatcagagcggcacgttggcgcataccgccggaaagctgggaagggcgggcatcacggaaacggtccagaccgtaggtctgaagaagggcttctgcatgtgccagcttttcaggtgtgagttctttccggatctccaggccgagaaggatgtttttgtagatgctccgccattccagaagatgatccttctggagcatatatcctacagcggcactgccggaggataccggccggcctcccagagtaatggaaccgtgctccggagtgagcaggccggcaatgagattcagaagagtggattttccgcatccggaaggtcctacaatggacaggaattcaccgggcatcagatcaaaggatatatgagaaagggcgggtgtctcaccggacaatgtgtgataggagagacacacgtcccgcactttcaggacaggattcatggatattgcctccttttcgtagataatggtataatattatcatatgtctgaaacaggagaaggccaatggcagagatgtatactttgctgtctgcctgaaaacagtcatagagaaaggaattacaaacattgaacaagagaaactaccagaaagaactggataaactgattgaaagaaaccagaaggaagggaaaacccccagactttttctgcatgcctgctgtgcgccatgcagtagctatgtgatggaatacctgtcgcagtattttgagattacgatatttttttataatcccaatatcgcaccggtggaggaatattcacaccgcgtggctgagatccgccgcctgatcggggagatggagtttgtacatccggtaacgctggtggagggacggtatgacccggaggagttttatgagctggcaaaaggcctggaagatgttccggaaggaggagagaggtgctttcggtgttaccgcctgcggatggaagaggcggcaaagctggcgaaggagggaggatatgattatttcaccacaaccttaagtatcagtcctctgaaaaatgcacagaagatcaatgagatcggtgaggagctggcagaaatctataaagtgccacatctgacttcggattttaagaaaaagaatggctacaagcgttctattgaactgtctcatgagcatgctctgtaccggcagaattactgcggctgtgtattttcaaagaaagaagccatggacagagaacggctggttactgagaaccgagtgaacagtaacaacggctgaagacagcaaacgtataattatgaaaaactttgcatttttataaaaatatgttacactaacacagaaaagtgcagacgtccgggagacggagctcgtgtatgtccggagaagacagttctgccgcaaaaaagaaaagtgaggaagaatcaatatggcacagttatggggaggccgttttacaaaagaaacggacaagctggtttacaattttaacgcatccatttcctttgatcagaaattttacagacaggatatccgtggaagcaaggcacatgttgccatgcttgcaaaacagggaattttgacagaggaagaaaaggatcagatcacagaaggactggacggtatccttgcagacgtggaagcaggcaagctggagatcacagcggagtatgaggatatccacagcttcgtggaggcaaacctgatcgaccgtatcggagatgccggaaagaagcttcacacaggaagaagccgtaatgaccaggtagctctggatatgaagctttatgtccgcgacgagatcgatgagacagataaggagctgaaggaccttcttcttgccctgcagaagatcatggaagagaatgttcacacctacatgccgggatttacccaccttcagaaggcacagccggtaactctggcacaccatgtaggcgcatattttgagatgttccgcagagaccgtgacagactttttgatatccgtaagagaatgaatacctgtccgcttggagcgggagcactggcaggaaccacttatccgctggatcgtgcctatactgcagagcttctcggctttgatgcaccaaccagaaacagtatggattccgtatctgacagagattatgtcatcgagcttctcagtgcattttctacgatcatgatgcatctgagccgtttttcagaggagatcattctgtggaattccaatgagtaccgtttcgttgagatcgatgacgcatacagcacaggcagcagtatcatgccgcagaagaagaatccggatatcgcagagcttgtccgtggaaaaacaggccgtgtttacggagcgctgacatctattctcacaaccatgaagggaatcccgcttgcatacaacaaagatatgcaggaagacaaggagctgacctttgatgccatcgacaccgtaaagggctgtatcgccctgtttaccggcatggtttccactatgcagttcaacaaagccaacatggaggcaagtgcgaagagaggctttacaaacgccacagacgcagcagactatctggttaaccacggtgtaccgttccgtgatgctcacggcatcgtcggaagactggtccttctctgtctggataagggaatctctctggatgagcttccgctttccgagtacaaagagatcagtcctgtgtttgaggaggacatctatgaagccatcagtatgaagacctgcgtggaaaaacgtgtgactctgggagcgccgggaccggacgtgatggagcaggtgatcgctcagaataaagaatatcttgaaaaaaattaagataatgcttgcattttaggaaaaattggtatagtatttacagaaaagacaaatgtgtgccatggagggacacaagatgaggagagttttattatgagtgaaaagcttaaagtcggtattttaggtgcaactggaatggttggtcagagattcatttctcttctggagaatcacccgtggtttgaggtggttactgtagcggcaagcccgagaagcgcaggcaagacctacgaggaggctgtaggcggcagatggaaaatggatactccgatgccggaggcagtaaagaagctggttgttatggatattcacgaggttgagaaggttgcagctactgttgactttgtattttccgcggttgatatgactaaggatgagatcaaggcgatcgaggaagaatatgcaaagacagagacaccggttgtgtccaacaacagcgcacaccgctggacaccggacgttccgatggtagttccggaaatcaatccggagcacttcgaggttatcgaattccagaagaaacgtctcggaacaaaacgcggctttgtagctgttaaaccgaactgctctatccagagctacgctccggtacttaccgcatggaaagagttcgagccgtatgaagtagttgccactacataccaggctatttccggagcaggaaaaaccttcaaggactggccggagatggagcacaacatcattccgtacatcggtggtgaggaagagaagagtgagaaggagccattaagactctggggcaagatcgaggacggcgtgatcgttccggctaccacacctgtcatcacatgccagtgtgtacgtgttccggtcctcaacggacatacagcagctgtattcgttaaattccgcaagaaacctaccaaagagcagctgatccagaagctggttgagtttaagggacttccgcaggagcttgagcttccaagcgctccgaagcagttcatccagtatcttgaggaggacaaccgtccgcaggtacagatggatgtaaactatgagaatggaatgggagtatctgtaggacgtcttcgtgaggatactgtttatgattacaagttcatcggactttcccataacacagtaagaggtgccgcaggcggagcagttctctgtgcagaaactctgaaagcgaaaggatatatccaggctaaataagaactggatcctttacaggaaataaagaaaatcatcagaaacgggatatcggtttttccggtgtcctgtttttgcgtatgtggaaggaacaaaggagatatgcgcagaaaagtaattactacagttgtgacattttccacaaccacggctgccatgaaaatggaaagaacggccaaggaatccgaatttccgggaaggctgatcccgatcccttcagagatcagtgcccagtgcggactggcatggaaatgcgtggagcaatcagaggaggaaacagaaaaatttctgaaaaaaaaggaactggcctgggatggcatctatcgtgttctggtataaaacggatattgtttgttgtatgtaacaaaacggaaatttttgaaaattttcgcatttttattgttaaataattagtaaagtgttacaatataacaagcagatttccggaaagcgtgttgctgtgaacaaagaagcagcaacaaagtgccacgcttgctaaaaaatatgtggaggtgctatttatgaacagggaggatgtagagaaactgtcaaccgctgcgaaaggtaagattaatttactgaacagcaatttcggaaaatactttatgcgggcgatcatggccggattttttattgatgtggcgatgatctatagtaatgtagtaggaaatgtattttccaaaacattcccggaatgggggaaattcctcggagccctggtgttctctattgcggttcttctgatcgtaatggtaggaggagagctgtttaccggtaacaatctggtaatggcatttggtgcgtatgacaagagcgtatcatggaaagacgtgggcaaggtctggggaatcagttacatcggcaactttgtgggatgcctgatcctggctctgatctttgttggtgccggagcgtccggtacagcagattactttgcgggatttataaacggaaaactcagtattccggcaggacagatgtttttccgtgcggtgctctgtaatttctttgtctgtcttgcagttctctgcggcattaagctgaagagtgagtcaggcaaattcctgatgatcacgatctgtatttcaggtttcgttgtcagcggatttgagcactgtattgcaaatatgggtatctttacagttgcattctgtatggtgcctggattgtctgtcggcgctatgcttaagagcatggtgatcgtaacattgggaaatatagttggcggaggcgtgcttctggcatggccgcttagaaagatgagtgcagataaatagtatggcaaaggctttatacatagcggagaagcccagcgtggcacaggaatttgcgaaggctttgaagatcaacggtcagagaaaagacggatatctggaatcagcagattccgtggtgacctggtgtgtaggacatctggttaccatgagttatcccgaaaaatatgatatcaagtataaaaggtggagttttgataccctgccttttttgccgcgcgaatttaaatatgaagtgatccccggagtcaaaaagcagtttgagatcgtaaaaggattgctgaaccggccggatatggagaccatttatgtgtgtaccgactccggacgtgagggtgaatatatttaccgtctggtagcccagatggcaggagtaaagggaaaagtccagaaacgtgtgtggatcgattcccagacagaggaagagatcttaagagggatccgtgaagcgaaggacatctcggagtatgataatctggcagcgtctgcgtatctccgcgcaaaggaagattatcttatgggaatcaatttttccagagttctgaccctgcgctacggaagcagtgtcaccaattatctccattccaaatatcaggctattgcagttgggcgtgtgatgacctgtgttcttggcatggtggtgcggagagaacgggagatccgtgtctttgtgaagacacccttctatcgtgtccttggcagtattggacttgcaggcgaaaattttgacggtgaatggagagctgtggaaggcagcaggtattttcagtccccgtatctttataaagaaaacggcttcaggaaaaaagagcatgcacagatgctgatcgatcagctgatggtgaaccagcccctttcctgtattgtggaaaaggtggaacgaaaaaaagaaaacaaaaatccgccgcttctttttaacctggcggagcttcagaatgtgtgctcaaagctgtttaagatcagtccggacgagacactccggatcgtacaggagctttatgagaagaagctggtgacttatccgagaacggatgccagagttctttccacggcagtggccaaggagatatacaagaatatatccggtcttcgaaattatcagcaggccggtgctgcggcggcagaggttttggggatggaatcctggaaaagcattgcaaagaccagatatgtgaatgacaagcagatcacagaccattatgcgatcattcctaccggtcagggattgaatgcactgggaagcgtgtctcttactgcgcagcgtgtgtacgagactattgtacggagatttttgtgtattttttatccgccggccgtttatcagaaggtgagtcttgtgacgaaactggacggcgaggcattcttttcatcctttaaggttctcaaagaagaaggctatctgaagattgccactaattctttttcgcggaaaagggcttcagacagtgagaaaaacagaaatggagaggaagacgaggtttcctgtgatactgtgctcctggaggcgttgcagaagctgaaaaagggtgatatacttcctgtgaacggtttgagtatcaaggagggtgagacttcaccgcccaaacgatacaattccggttccatgatccttgccatggaaaatgcaggacagctgatcgaggatgaggagcttcgagcccagatcaagggaagcgggatcggcaccagtgctacccgtgccgagatcctgaagaagctttttaacatcaaatatctggcactgaacaaaaagacccaggtgatcactccaacacttcttggggaaatgatcttcgatgtggtaaattgttctatccggcagcttctgaacccggagcttacggcaagctgggaaaaggggctcacctatgtggcagagggcagcatcacggaacaggaatatatggacaagctggagcattttgtgcgggtacgtacccggcaggtggaggcaagcaattatcagtataacctgcggcagttttttgatgtggccgctgtaaactacaggaagccggagcgagcttccagacagggaggaaagaaatcatcatgatgaaagattttactatcagcaatatgctggatctgaatgagaccattgcagcagagctttttgagggaaaaacctatccgtgggaggttcttccggagatcggagatttcattattaagctgggaaaaacactggatccttctgaatatgaggagaagggcgaaaatgtatggatcgcaagatccgctacagttgcgccgactgcaagtatcaccggaccggctatcattggcagagacgccgaggtgcgccactgtgcatttatccgcggcaaggctatcgttggtgagggcgcagttgtgggaaattccacagagcttaagaatgcagtgctgtttaacaaggttcaggttcctcattataattatgttggagatgctgtgctgggatataagtcccacatgggtgccggatcgatctgttccaacgtaaaatcagacaagaagctggttgtcgtaaaagacggggatgaaaagatcgaaaccggtcttaagaaattcggagcgatgctcggagatcatgttgaagtcggatgcggttctgtgctgaatcccggtactgtgatcggacggaattctaatatctacccgctgtcaccggtacgtggatgtgttccggcggattccatttataaaaatgcaaaagaaattgtgaagaaaaaatagtttttctttgttttttgaaataagttctgcttggtaagcagcggaaggttcgaggaggggaagcactcacagttgcgaaggccgtctcccctcctcgagctcctcccctcctggccacgcagggaagccgcacttttttgagagtgtggctttttttgatggggcgatggatgcgacggtattgtttgcgagaggctgtgccgatcgggtgagagggggacggaaggcggcctgcgtagcaggcctgttcctggattgatgaatgaatagtttgacttttagatgtggtaaaacagaacatacaattataatcggcacagtgataaatgggtgatagaagtggaatacaggaccgaaccaggagtgttacattatgaaggggcctggccgaattgcgtgcccggaaagaggggtgcctgaggggagaaaaacgggcttcgcaactctgagtgctttctcccctcagaactccccactggaaaagtgcagaactgaaatctcaaaacttttcacatacaacacgcacatccatataagacaataagaaaaaaagaattaagacagaaataaaatctgtcgaagtatgaccagtcccataatatggactgggtaaaaccagtaaaagaaatattttgctgattttccgcggatgaagcctctttttccattgtacaggttaatggacagaaaggcaaaggaggctctccattcatagtaaagccagcagcttccgaggattgcctggcctggtttatcgtttcgcatatagtatatgatcagcaggaagatatacccccgccatccatagtctgctttcagaaaaatggaaacaacaagcagtcccaggatgcagagaagctgcatcgaaggtctggtctggaaatattcgatggcacaaaaggccagatatccgaggaaaagcgtaaaaaacacattttgtctttcgtaacgcagcgtatttgtaaacatcagattccacggaatttctgagagcagcgcaaaaagaaggagatttcttccatagaggaaccggctccgtgtatgccggaagccttccagcaggagaaaacagaagatgggaaaagcagctcttccgatatcgcggaaaataagatatacagtatattctctgccgaaaagtgtaaacaggattttctgtgcaggctgatacatactgagcagcacagctccgatatgatcgatcagcatggtgatgaccgcgatcatcttcagagcgcttccgctgagaatgcggtatttttctggaaaaacagaatccacagatgcattcatgaaaaatatacctccagggttaaacttgctaatatattatcacatacatacagtagttgccagaaatatttgacagttaggcatgcaatactgccggaataactaccaatattatgcgttttatggcaaaattttatcaaatatgactggacgaaacaaaggttttgtgagaaaatagccatagggtgttatcgaactttttttctcaataacatcggtcaatctatacttgaaaggagttttaaaatgatttattcacgcgaagtagaagaaatgtgtccagtggcacagggcgtacatcatggtgccgctccgatcccggaagaagcaaaatgggttcaggcaaaagaagtaaaggatatctccggatttacacacggtgttggctggtgtgctccgcagcagggtgcttgcaagctttcccttaacgttaaagagggaatcatccaggaggcacttgttgagacaatcggatgttcaggaatgactcattctgcagctatggcttctgagatccttccaggacttaccgttatggaggcgctgaacacagaccttgtatgtgatgcaatcaatacagctatgagagagcttttccttcagatcgtttacggacgttcccagtctgcattctccgaggacggacttgcagtaggcgctggtcttgaggaccttggaaaaggacttcgttctcaggttggtacaatgtatggaactctgaaaaaaggacctcgttaccttgagatggctgagggttatgttacaggtatcgctcttgatgagaacgatgagatcatcggatatcagttcgtaagccttggaaaaatgactgacttcattaagaaaggtgatgacccgaacacagcatgggagaaagcaaaaggtcagtacggccgtgttgcagatgctgttaagatcatcgacccaagaaaagagtaattacacttcgtaaggtgaaaatatcaggaggttacaggaaatggctttatttgaatcatatgagagacgaattgacaagatcaattctgttttaaacagctatggaatcgcttctatcgaagaagctgagaaaatcactaaagacgcaggactgaacgtttacgatcagatcaaaggcattcagccgatctgcttcgagaacgcttgctgggcttacacagtaggtgcagctatcgcgatcaaaaaaggctgcagaagagccgctgacgcagcagcagctatcggagaaggccttcaggctttctgtatcccgggatccgttgcagacacacgtaaagtaggtcttggacatggaaaccttggaaagatgcttcttgaggaagagacagactgcttctgcttccttgcaggacatgagtctttcgcagcagctgagggtgcgatcggtatcgcagagaaagcaaacaaggttcgtaaaaaacctcttcgtgttatcctgaacggtcttggaaaagatgctgctcagatcatctcccgtatcaacggctttacatatgtagagacagagtatgatccatataagaacgaggttaaggaagtattccgtaaatcctattctgagggacttcgtgcaaaggttaactgctacggcgctaacagcgttccggaaggtgttgcgatcatgtggaaagagggcgttgacgtttccatcacaggaaactccacaaacccgactcgtttccagcatccggtagcaggaacatacaaaaaagagtgcaacgagaaaggcaaaaaatacttctccgttgcttctggcggtggtacaggacgtacacttcatccggacaacatggcagcaggtcctgcttcctacggtatgactgatacacttggacgtatgcattctgacgctcagttcgcaggatcttcttccgtaccggctcacgtagagatgatgggtcttatcggcgctggaaacaacccgatggttggtatgacagttgctgtagctgtttcggtacaggaagctgctgacgctggcaagttctaataaaacctttttaattaaagagtcaacaaaccttgaaagtaccgtagttccaagggctgcggtacttttcttaattttgatcgtaaaaaagaagatgtaatttgagtcagtgtgagaagtcttgaaaatggtaagataggcaacaggtaggtaacaagtaggtaacaagtaggtaacagagcgaaggaaacaaaaagaagagccgatcatagcccctttcattgattaagaattaacgatatcatcaatcttcttaagttcttcatctgaaaaatcagtatgtccgattatcttgatattatcaagaatctgctcaggttttgaagctccaattaggacacttgttactttatcatcttttagaatccagctaagagccatctcggcaagcgtctgtcctctttacatagcaatttcgttaagtgcctgaatctgggaaagcttttctgatgtaagtgcagtctcattaaggaatcgtccgtcagtggcaattctgctatcagcagggataccattgaggtagcgcttcgtaagaagtccctgtgcgagaggagagaaagctatgataccttttccaagctcataggcagtgtccttaagcccgttattctcaattgttctgtcaaaaatagaataacggttctggttgattacgaaaggacatttcaaatcggttaggatttctgtagcttttttaagtgtgggaccatcataatttgaaagacctacataaagggcttttccacttcgaacgatagagtcaagagcacccatagtctcctcaagtggtgtctcaggatccattctgtgatgatagaagatatcgacataatcaagtccaagtcgcttaagactctggtccaggcttgcaataaggtacttgcggcttccccaattgccataaggtccttcccacatatcaaatccggcctttgtgctgatgagcatttcatctcggtatggatgaagttcttccctgaaaagcttgccgaaattgcgttctgcactgccataagcaggcccataattattggcaaggtcaaaatgagtgattccattgtcaaaagaggtaaagcacatctgcttcatattttcgtagatacttgtatcaccaaaattgtgccagagtccaagtgaaacaacaggcagcttcaagccacttttaccgcagcggttgtaaaccattgtgtcgtatcttttttttgtctgcaatgtacatgtgtatatacctccatgattatatctttctgctacacttaggatatcatattttttcttcaattgcatccagctcttcatttcagcctctgttttcgctgtatgcgttactgttcacacgatgtgcgaccagcaacgcatctcgccattttaaatcgcctttggcgatggggcgagatgcattcaagccaaaacatgcatcctccgtgtcaatcagcgaagtgattgacacgggagtgaacagtaacctgtatgctactgcaatttctccaacaattccagatgaagtttctgcaccttaatcttttgtttttgtatattcactctttgagtggactttcctccttcgattttctttaaagctttatgcttcataaactcttcttttatatagttttttcaaaacaactatagtaatatagagttatcacaatcttagctttctactattcaacggttccttttcgccatatccagtggggtgggtaaagatgacccaataagtgaatgtaattgaagaaattaaaaaaaggactattttttatgaacaatataaaagaaagaataaaaatattttcaggggcgcagcttaaatacattgcttttctatctatgcttatcgatcacacaaacaaagcgttaatctatccgaatttggatggaggagcattgaatcggttgagtgacttttttgatattttaggaagaatcgcatttccaatattcatcttccttctcgtggaaggctatttccacacaaaaaataaatggaagtatttaattacacttcttgtatttggagtaatatcagaaattccttttgatatgtgtacaacagctacattttttgaagccaactggaacaatattatgtttacgttagccttggtgcttgccatgatctggctgattgatgtactcaaggaaaagatggcagcattgccgaaagctttatggtatttcgtatcatttctcattgtggcagtattgtgctttgctgcaatgaatctgggattagattatgaacaccatgcggtgctgattggatatttctattatatttttcatgaccaacaggcacttgcgattccattttcctatctttccatgttcaaagaaccatgggctttgcttggatttggcctgacacttacttataatggagaacgtggaaaacagaataagtggtttaattatcttttttatccagtacatttgctgattttaggaattataagaatgtgtcttaagatttgaatatgaaattttaaaaaggacttttcttttaaaatgaacgaaaagtcctctttttgcgtagatgactgttatttcacagcccctttctttgtgtctaaagaaaaatagaacaaatcagtctgagaacgcatgaaaatttatgcgtagcttacagatagcttacacgtagcttacatttttggggaatttgtgaaatatttcttggagaaattcataaaataaatcaaagcggcaggggagatactgagaatattcatggaagcgcttgtgaattatattaaaccggaattgctgatcacagcaatcgctttgtattttatggggatcgcactgaaggaggctcaggctgtgaaggacaaatatattccgctgatattggggtgtgcaggaatccttatatgcggaatttatgtttttgctacctgttcctgtaaaaatgcacaggatattgcaatggcagtatttacatccacaacacagggagtcctggtggcggggctttctacatatgtgaatcagctgatcaaacagctggaaaaagatgaataatggattttgtaaggtagtttcagatacatgcagcagctgcaggaatttatgcgccagaagaaagcctttcagaacaggatgcaggtaatttgcggaaatgccataattgagagtaggagaaaatatatcataaaaaggaaggatacatcatgcatgagcagatgcatccttcctttttgaattggttatttatgcatttttcagtgcctgatccagatccttgataatatcatccacattttcgataccaatggaaagacggatcattccgggagaaactcctgcttcaaccagctgctcgtcgttcatctgacggtgggtatggctggctgggtgaaggaccatagtgatggaagcagcaacatgagttgcgatggtggcaagcttcagactgtccataaaacggactgctgcatcacggccaccggtcagttcaaaggagataacgccgcaggtacgaccatccttcatatatttctgagccagtgcgtgatatttatcctccggaagtcctgcataatttacatgagaaaccttttcgtgtgcgtttaggtattctgcgatcttctgggcattggagcaatggcgttcaacacgcagtggaagcgtttccaggccgaggttcagaagaaagcagttcatcggagacggaatagagcccaaatcacgcatcagctgggaagtagccttagtgatgtaagctttttttccgaactgctttgtatagataacgccgtgataggattcatccggctctgtcaggccgtgatatttatggccgtaggcatcccagtcgaagttaccgctgtcgacaatggcgccgcctacctgaacggcatgtccgtccatatatttggtggtggagtgggtaacgatatctgcaccccactcgaagggacggcagtttaccggtgtggcaaaggtgttatccacaataagaggcacgccgttttggtgtgcaacgtgtgcaaatttctcgatatcaagaactaccagagccggattggcgatagtttctgcaaagagaacctttgtgttcggtttgaatgcggcagcgatctcttcttctgttgcatcggtatcaacaaaggtgcagtcaatgccaagtttcttgaaggtgacggcaagaaggttgaaggttcctccgtaaatggtagaagcggcaacaacgtgatcgcctgcctcacagatattaaatactgcgtagaagttggctgcctgtccggaagaagtcaggatcgcagcaacaccgccttccagatctgcgatctttgcggctacggcatcgttagtcgggttctggagacgggtgtaaaaatatccgtctgccttcagatcaaataactggcccatttcgtcggtggtgtcatatttgtaagtggtgctctgatagacaggaagtgcacagggctcgcctttggatggggtatagccggagtggatacatttagtctctaaattatagtcgctcatagggataagtcctttctgctgtgtttttcgtatgaatttaaccgaatcagggaagtttgctgcttcagatgcggataccccattgatctggattaaggaagcttcctgtatttccggatacttcattcctgtattatgcgtttcagggatttctgagagaatctttgatccttgcagttcggctaaataaagtatgaaaaatgcatttgtgtattttaaataaaactacatataagtataactctttatgtgttgaaatacaacaatattctacataaactccactgtggtataagggaaatgaaatgttgcgttctggtgcacataataaaatgctacatgatcaacgttcgtaataagcatagtaagtcattttatatatgcggaaatttgagcgaaggtcggaaaaatactgtaaaacaaacaaaatatgtgaataaagtaacaaatagtgaaaatcgcataaaaacaaaatggatattttgtacaaaaaagatattgcgttcacgtgcacaagatgataatataacatcatcaaaaagaacacaaaaacagaaaacaataaacaataaaaaatgaacggaggaatttaaaatgttaagagtaggagttatcggatgcggcggaatgggaagagatcatatcagaagactgacagagaagatccagggagcagaagtagtagctgtttccgatgtatttgaggaaagtgccaagaaagcagccgagatctgcggagcaaaagtctatgcagacagtaaggagctcatcaatgcagagaacgtagatgcagtatttatcgtatctccgggcttcgcacatgtagattctcttcttcaggcgatcgaggccggcaagaggattttctgtgagaaaccattatgtacaactgctgaggactgcctgaaagtagtaaaggcagaggaggcagccggcaaacatctcatccagcttggatttatgagacgctatgacaagggatatcagcagatcaaggaagcacttgcaaccggagaatacggcgagccgctgatccttcactgtacacacagaaatccagaggtaggtaccaattacaatacaccaatggctgtgcacgataccgcaatccatgagatcgatgtccttcactggcttgtagatgatgagtatgaatcagcacaggtagtaatgccaagagtgacgaaatattcccactctgagctgaaggatccgcagatcatgatgctccgtactaaaaaaggtgtatgcattgatgtagaagtatttgtaaactgcaagtttggatatgacatcaactgtgaagttgtatgtgaggacggtgcactgaaaatggcacagccggcttatccgtctatccgcaagaatgcggcagtgtccactgctattgacacagactgcttcgtaagatttaaagacgcttatgataaagaggttcaggactgggttgataacgcagaggcaggagtgatcacaggaccgaatgcatgggatggatacctggcagcgatcacagcagatgctcttgtaaaagcgcaggaaaccggacagatcgagaaaatcgtttcagcagttgagaagccggaattttataaataaatatattttacgagctctacctcatcaagtgtgagttatcataccaacttattgctacagacttccccaatgagtctgcggcggcagttaccggcaggatccgattccgcttcggctttgttgaaaatgcagtggaaaacctgccggtgagattaactggaaaaattggctgaaaagtaaaaacatatggagggtattgaagatgaaattaggatttaatgaagcaactgcactggaatgtaaaggacagtctcttatggcagacctggagatgtgcgagaaatatggttttgattatattgagatccgctttgactgcgtaaaggactatcttaaagagcatacactggaagaacttgcagactggtttaagaatcatcatctgaaaccatgggcatacaacactctgatcttctttaaccagagagatgaggcaggggaaaaagagattgacgaagaagttgattttatcctgaaggtttccaaagcgatcggaatgaaaatgctgatcaccgttccaagctttgatgtaaaagacaaatctgtcagtgagatcaaagaagaagcagttgcacgtcttcgttatctttccgataaggttggcgcggatatgaagatctccttggagttctgtggtgcaccgaactgctccatcaatcagtttggaacagcctatgatgtggtaaaagcagtagacagagataatgtaggcgttaccgtggataccttccatttccatgagatgtgctcccgccttgaggacctgagagctgctgatggcaagaagatttttgcataccatttaaatgactgtgaggatcttccgcttggctcctgcggagacgacaagagactgtggccgggtgagggtgttgtagatcatgcaggaatcgcagctgcactgaaggagatcggttttgatggcgtttgcaccatcgaagagttccgtccggaatactatgcaatgagccatgaggacaacgtgaaaaaggctgcggaagttaccagagactttgtgcagaaatatttcggataattcattcagaaaggtccgaccttaaaccgataggaggtagatactatggctggtaagggaatccctgaattgttgaattacaagcagaaggggaaagacttgaatgaattcatcaaggttccgttgtcggaaaagctggcatactgttttggtgatccggcactgaccttgatgtataccatgactacaactctgctgatctatttttataccaacgttgttggaatatcagcaggtgcggtaggaatgatcatgcttttgtcccgtgtttttgatggattttccgatgtgctgatgggaactattatcgaccggactcattccaagtatggaaaagccaggatctggatcttaagacttgcggttccttatgcgctggcagcggtgcttttgttcaccatgccgccaatgggaaatatgggaaaaatcatctatgcttttgttacctataatatcatgaatacggttgtatacactgctatcagccagccattccatgcactgggatctctgatgagccgtgaccgtcgtgaccgtgatgtgatctgtaacatccgcatggtattgtcgatcacagcaagtatgatcattactgcgttcacactgccgctgatcaatatcgtagcgaatattaccggcaatcagcagatggcctggatcctagtaactgccggctatgcgatcatttctgtcggtgtacttgtgaatacttatatggtctgtacagagcgtgtttctgcagcaaaacaggaaaaggaagatattccttttgtggaagcatttaaagcaaccgttaccaaccggtatttccttatcgctctggggctgatgatcttttataccgcatatcaaatcattatcggaacggaccttacctattactgccagtatgtactcggaaatgtagacctcgtcatgcctctttccgcagctgagaaactggcaactgtggcaggaattgcccttctgccgaaggtacttccccgttatggaaaaagaaatctcatctgtgccggctgcatcctgggcgttgcaggacagcttctgttcctgatgaatattaccagtgtttcgcttggtgttgtaacctgtatcatgagaggtatcggaatcgccccattctatggtgtgcagtattctcttccaagcgatgctattgagtatggccagtggaaaacaggcaagcgtgtggagggtctgatgttctcatctatgagcatgggtcagaaagccggttccggactgacttctgctattatgggaggaattctttcggcagcatattttgacggaacaaaggcgacagcggcagagcagtctgcagaggcaatccgcgtgatcaagggattttatctgtatgttccgatagcaatctgggtagtgatgtttgtgatcgcagcatgctaccagctggacaaagtttatgacaaaatgatgcgtgaactgatccagagagaatcgggagaggaaagcgtctctgtgccaggcgagatccagtccatgccgttaccggaagcttccggaaaccggatcaacgtggcaattggaagactgtatggcagcagtggaagaaagattgccgagggtgttgcaaaagcaatggactgcaaggtttatgatcgccagatcatctgtcttatggcagaaaagttcggtatggaaaaagcagatctggaaagtgtaaggcagtatctggattcctacaattatgaggattctgagcttacattttccccgtatggacattcatcggcaggtgcggcagcagattatacaggtgttcagatgtttgaggtgcagagccggatcatccgtgagctttctgagagaagaccaggtgtattcctgggaagatgtgccaactatgtgcttcgtggagagccgcatacatacagctttttcgtttatgcagatgatgcttaccgggaaaaagagggccaggaatattataaaggccagtctcttggagaactgaagaaacgtgatcagatccgaaatgaatattatgagaagtttaccggaatccgcagagacgatccccattattacgatatggtgatcaatgtatccaaaacaggtgtagccggagcggccagcctgatcctggattatatccggaataaagaagaggaaaaaggagggaatgcatcatgaagatcgcatttgacgtagatgttcttgcgaaacagatggatatcaaccgtatggtccatcaggtggcggactggggatataaatatattgaacagtctccgcatccgaggatcaatccgttctataagcatccgttgttttcaaaagaatgtgaacaggaatacagacaggctcttaaagagactggcgttgagatttcgtcctttatcgtggtgtatcgctggtctggtccgacggaggaacagagacagtttgcagttgcaaactggaaacggatgatccagatcgccggagatatgggagtgaaggttatcaatacagagctttcgggtgatccgaaccagcaggagatctgcaatggaatgtggtttagatccatggaggaattgcttccgctgatcgagcgtgagggtatccgtgtggagatccagtctcatccttatgatttctgtgagctgaataatgagacctgtgatatggtgaaatccttccgttctccaaaccttggttatgtgtattcttctcctcacggcttcttctacgatgagggcaaaggagatgtgcggtccatgctgaaatatgcgggagatgaactgacccatgtactttttgcggatacctttaaccagaccatggactgcagatacattttaaatccgccgtggctgaatggccgtggaaaagcggatgtgacggtgcatcagcatcttgcaatgggtgagggtgatgtggattttgatggtatttttgaaacattgagagaaatggattttgccagcaagcagctgaaaccggatgcaccgaaagccggcggcgataacattgcctgcgtttccatgtttggttttccggaaaagatggataagcaggcaccggaagcaagagagcggattgagagagaactgctggggaaatgatcgggtgatcgtggcagatcagaaagaaaactgtaataaatgagcagctgacagtacgcagaacggtgaataagactgataaaataatgaatgtgtgcagaaacacggtttccaggatgaaagtttcattgtggaaaccgtgttttttgatgtctttctttacaaaaaaactttacatatatcaaacaactgtcttgtcacatgtaaaggactgtggtattatgtgtaagatgttttgaaaaaagttacatgataataaaaaagcagatcagaagcatctgcataataaagactagtacagcgaaaattaagtttctgctatattgacgcagcagatgaagaaatcagacaagtcaatatggcggttacttaatattcgctgtactagaaagcaaaagcaggaactcaaaaaagaaatcctgcaggaaaggtgaaagataatgacagttgcagaagaaatccagaaattaaaaaaagaaaaagatgctatcatccttgcacactactacgtgcgtcccgaagtgcaggatgtagctgactatataggagattccttttatctcagcaagatcgcagccagcgcgaaagagaagacgatcgtgttctgtggagtaggatttatgggagagagcgccaagatcttaagtccggataaaactgttctgatgcctgccatggatgcagactgtccgatggctcatatggcaacagaagaaggcatccgcaaggtgcgagaggaatatgacgatgtggcagttgtctgttacattaattccacagcagcattgaaggagctttctgatgtatgtgttacttccgcaaatgcagtaaagatcgtaaaagcgcttccgaacagaaacatcttttttatcccggacagaaatcttgcacattttattgcagaacaggttcctgagaagaactttatttataacgaaggtttctgtattgtccatgaatttatggatccggaagaagtaaaagcagcaaaagaagcgcacccggatgcactggttctggcacatccggaatgtcctcagacagttctgaaacaggctgattacatcggaagcacatccggaatcattaaatatgcacaggaaagtgacaataaagagtttatcatctgcacagaatgtggcgttcagtacaagctggaaactacatgcccggataaaaaattctacttcacagaaaccgtaccggtctgcaaaaacatgaaaaaagtatttctggaaaaagttctccacgttctgaaaactggggagaatgaggttcatgtaacagacgagacacgtgaaaatgcgaagaggccgctggagcggatgctagaactggcaaaataaataaaacacatttgtataaaagatttgtctgagttggctgaaaagagaaatcaagacagagaggcgaaaagcaatgagaattaaaacagacgtagtgatcgtgggaacaggtgttgcaggtatattcagtgccttgaagcttccgcgggacaaaaagatcgtgatcatcacaaaagaggatatgaggagtagtgattctttcctggcgcaggggggaatctgtgtgcttcgtgatgaaaacgattacgacagctattttgaagacaccatgaaggcaggacattacgaaaacagaaaagagtcggtagacattatgatccgaggctccagagatatcattaatgatcttgtcggatatggcgtggattttaagatggatggagatgattttgcctatacaagagaaggtgcacattccagaccgaggatcctttatcatgaggatatcacaggaaaagaaatttccgaaaaactgctccagcaggtcctgaagcttgaaaatgtaacaattctggaatatactaccatgcaggatattcttgtggaaaatggcaaatgtacaggcctgaaggcagtttccgcagaagcgaacagggcacgtcttgaagctatggaagccggaaaagcagtgaaaacccaggaagagatccagccgggcggagagatccaggtagagatttatgcacaggatacgatcctggccagcggcgggatcggaggaagatatgcgcattccaccaactatccgcatcttacaggggatgctcttgatattgcaaaaaaacacaatgtgcgtctggaacatctggattatgtgcagattcatcctacaacgctgtattccaagagaccgggccgcagattcctgatctcagaatcggttcgaggagaaggtgcagtactttataacagcaaaaaagagcgttttgtcaatgaacttcttccaagagatgtagtaacaaatgcgatccgggaagaaatgaaaaaagaaggaacagaccatgtatggctttccatggaaaatattgataaagatacgatcctgaatcattttccgaatatttatcagaggtgtctggaagaaggctatgatgtgacaaaagaatgcatccctgttgttcctgctcagcattatttcatgggcggtatctgggtggattctgacagcaagaccagcatggaccagctttatgcagtgggagaaactagctgcaacggtgtacatggcgcgaacagactggcaagtaattccctgctggagagccttgtatttgcaaaacgtgcagccaaagcaatctcagcagaaaagaaaagtactgcaggtgcggcataaatgcagccggaatataaatatccgtattatgaaaaacaggagcagccttgctttggagaacagggcagctgtgatgattaagaaagagaaggtattgtaaaatgaatacgatcacaatgacacttcaggtagatcacctgatcctggaggctttaaaggaagatatttcaagcgaagacgttaccacaaactctgttatgaaagaagcagttccgggagaggtagatctgatctgtaaagaggatggaatcattgcgggactggaaatcttcagtcgtgtatttacgcttctggatgctgacacaaaagtggcgctgttctgtaaggacggcgatgaagtaaaaaaaggtcagaaaatgggaaaagttacaggagatatccgggtgcttctttccggcgagcgtgtggcactgaattatcttcagagaatgagcgggatcgcaacttacacacattctgttgcgtctcttcttgagggaacagggattactttgctggataccagaaaaacaacgccgaacatgcgtatttttgagaaatatgcagttcgtgtaggtggcggacagaaccacagatataatctttcagatggagtccttctgaaagacaatcacatcggagcagcaggaagcgttgcgaatgctgtaaaaatggcgcaggagtacgctccttttgtccgcaagatcgaagttgaggtggaaactcttgctcaggtaaaagaagctgttgaggctggagcagatatcgtcatgcttgacaatatgactccggaaatgatgaaagaagcagtaaaactcattgacggaagagcaaaaacagaatgttccggaaatgttacaaaagaaaacattgcaaagatcagggatgttggtgtagactatgtatcaagtggtgcattaacgcattctgcaccaatccttgatatttcacttaagaatcttcatccgctttcctgaagatcacagaattttgcaaaataccgagtgctgtgacaggaaatatccggaatatcagaaaaaaagaagcgagaattatcggaagcagatgcataacaggtaatatctgaaccgggtgggagatatcgcgagaatgaaggagacagatatcggaataaaaagtacaggtacagccaggaaaggggaacttaaatgactggttcagaacgcaggacagcgatcatggatcaaattaaaaacagtgaacggccggtctcaggaagtgctctggccagaacatttcaggtcagcagacaggtgatcgtgcaggatattgcgctgatacgcgcggaggggaatgacgtgatctccaccaacagaggatatatttttactgctccccatactgtgagccggatattcaaggtgcatcatacagatgcggatctggagaacgagctctgcgggattgtggatcttggcggaaaagtgatcaacgtaatggtgaatcacagagtttacggacatatcgaggcagaactgaatatcagctccaggcgccaggttgagaattttatggaggatatccgaagcggcaagtccagtcctctgaagaatatcacatcggattatcattatcataaagtagaagcagaatccgaggaaatcctggatatgatccaggatatgctgaaacggcgaggatttctgatcgaagcagaatagcagaagtcagatacaaaaagaaaagatatacagaatgagaaaattctgttaatatgaaaatagagtgatcacgaaaataggagaaggaatcctgcatggcagggttccttcttgcaccctgcggaaatgtgcaccttgtggaaatgtacaaacagggaaaacaggatgcagatatgagggtgagaaaaaatacggttggatatgtatggaggggaaatggattatcagagtatgtttacatttatgctggagatggcaggaactattgcgtttgctgcttccggagctatggtgggggcgcagagaggaatggatattttcggggtctgcgttcttggagtggtgactgcagtaggcggaggagctaccagggatattatcctgggaatcgtgccgccgggaatgtttcaggatccgctgtataccattgtggcaaccgtgacgtcctgtattgtttttgcagtgatgtactggaagcaggagctgctggaaggcgggaaccggctggtctatgataaggtgatgctggtgatggatacggttggccttggtgtgtttactgtcatgggggttgataaggggatttcccagggatatatgggaagaactttttttcttgtgtttcttgggactgtcacaggagttggaggcggtctgatccgtgatatgatggcaggagtaccgccatatatttttgtgcgccatatttatgcctgtgcgtctattgtaggggccattgcctgtgtttggatatacaggctgtggggcggagtgccggccatggtgatcggaacggtagtagtgatcctgatccggtacctggcggcacattaccggtggaatctgccgagactgagaagagaataaaaaaagatatgaaaagctccggaacatttaaggaataatgttccggagctttttggcttttatttggtttatattgcgtagaagattttatcggttcctctcataagagaatcatgcgtctgtatcctgcagagccaggaagccttcctcgccggtacggatcttgacaacgttttcgatatcgtaaacgaagactttaccatcgccgatctgaccggtatgaagaacttcttttgcagtatcaataaccttctgaaccggtacaagacttacaacgatctcgatcttaaccttcggacggaggttcatgtcaacctcaacaccacgatagtaggttggagcacccttctgaacaccacagcccataacgtttgtgatagtgataccggttacgccgatctcgttcatagcctgcataaactcatccagcttgttctgacgtgtgatgataacaacctttgtcagtttgtgtacgccgtctgcaggaatttcaggaacagattcagcaggagcagaaggagcatgttttacaacaggggcttttacggaagttcccattggagtcggagcctttgtcatggtatcctgtacaaagaatccatcgtatgcacttgcgaggccatgctctttcatatccagacctgcgatctcttcctcagcggaaacacgaagaccgatcgtgtgtttgatcacctggaagataattgtcatagtaacagcaacccatgcgatggtgataaccataccaataaactgaacaccgaagccatggaaaccaccgcctgtgagaagacctttccactcggtacctgcaccgtcggagaaaagaccgacagcaagagttccgaaagcaccgttaagaccgtgaacgccaacagcaccaaccgggtcatcaattttgagaactttatcaacaaattcaataccaaatactacaatgaatccggagaggattccgatgatagctgcagatgtaggagatacggtatcacagcctgctgtgatggctaccagtcctgcaagagaaccgttcagggacatggaaacatccggttttttgtagcggatccatgtgatcagcataactgttacagtagcaacagcagctgcaaggtttgttgttacgaagatctttccggcgcttacaatggcatcgccttccatgctgacagtagatgcaccgttgaaaccgaaccagcagaaccagagaatgaatacaccaagtgcaccaaccgtaaggttatgtcccgggatcgctctggatttaccggatttggaatattttccgatacgaggtccgaggatgatggcaccgattagtgcagcaacaccaccaaccatgtgaacggcacaggaacctgcgaaatcatgaaatcccatctggctgataaagccgccgccccagatccagtgaccggatacaggatatacaacgagactgatcagtaaactgtagatacagtaggagatgaatttagtacgctctgccatggcaccggatacgatggtagcagaagtagcacagaatacagtctggaagatgagaaatgcccagaaaggaactccatccggaagcattgcgtttccgtagtttgcctctgaggcgattccgccgatcttgccgaagaaaccgtttcctgcaccgaacatgatgccaaatccaaccagccagaagaccggtgtaccgatacagaagtccatcaggtttttcatgatgatatttcctgcgttttttgctcttgtgaatcctgtttcgaccattgcaaatccagcctgcatgaagaagaccagtgctgcaccgacgaggacccaagttgtgtttactgaagaatacataataacactccctttcccaatttttttctttcttattatgtatagaaagaatttttgtaataccggacagaaaaaaacagatagaatttatccagtatcagtataacgaaaaagcgcaggagagaggaaattctcttccgcgcctttacgaaatcaaaattagtatatgtaaaacaggggatatctgtatcgtgtgattaatggatgaggaaatcgataatgaattatgaagtagagttcataagggatatcccctgtatttaccgtatgaaattgttatctgatatccgtgatcagatggagaataacagctcgtcgtaggtcggataaggaagtaactcatccgggatcagagcctctgcctcatctgcagattttcttaaagtttccatgtcttccagaacagtttcctgataagccttggagcatgcaagtacatcgtcagaagaagcaagagcttttgctatatctgctttcagagtttccagatcttttgccatggtgtctgcaagtgtactcagtttggagatcagagcagcttcacttgctacagaaatatcagctactacggatttttttgcagctgcagtatctgcaagcttttcaacatatgtatatacagaaggaattacctgcttctggatcatctcagccagagtgttggactcgatgttgatggtcttgtaatagttctcaagccagatctcgtaacgggagaaaagctcttcctttgtaaaaatgccatgctttgtaaacagctcaatgttcttctcagcaatgaaatgcggaagtgcatccggagttgttttcagattgtagagaccacgtttctcagcttcttcaacccattcgtctgtatatccgtttccgttaaagatgatgcgtttatgctcttcaatggtcttcttaagaagtgcatgtactgcgctttccatttcttcttccggaacatccttaagagctgcgctgaattctgcaagaacctctgcaacagcggtattcagtacgatgttcgggtttgcgacagatgctgcagaaccaagcatacggaactcaaatttgtttccggtaaatgcaaatggtgaagtacggtttctgtctgtggtatcctttatgaagtgcggaagtacctttgctccgatatccatctgtaccgcatgcttattgctgaagaaggtatcgttttcaatagatttcagtacgtctgtcagctcatctccaaggaagatggatacgatcgcaggaggtgcctcgtttgctccaagacgatgatcgtttccggcgcttgcaacggatacgcggagaagatcagcataatcgtcaacggctttgatgacagctaccaggaataccaggaactgtgtattttctgccggtgtttttcctggatcaagaaggtttacacctgtgtctgtgctcatagaccagttgttgtgtttaccgcttccgttgattccctcaaatggtttctcgtgaaggaggcagaccatgttgtgcttgtcggcaaccttcttcatgatctccatggtcagctggttgtggtcaacagcaacatttgtggtatcaaatacaggagccagttcgtgctgtgcaggagcaacctcgttatgttttgtttttgctggaatgccaagcttccaaagttcttcgtcaagatcatgcatgtaagcagcaacgcgaggcttcagggctccgaagtaatgatcttccatttcctgtccttttggtgcagaagcgcccagaagagtacggccgcagaagatcaggtcttttctctttttgtaaagatccttgtcaaccaggaaatattcctgctcaggtcctacggttgtgtcgatgtgacggacctctttgtttccaaggatgtgaagaatacgaaccgcttctttgttcagaacatccatggaacgaagaagaggagttttcttatccagtgcctctccgctgtaggaacagaatgcagtaggaatgtaaagagttttatctttaatgaatgcaggtgaagtaggatcccatgctgtatatcctcttgcttcaaaagtagcacgaagtccgcctgacgggaagctggatgcatccggctcaccttttaccagctctttaccggagaaatccatgatcacctgtccgtcacctgtaggggagatgaagctgtcatgcttctcagcagttacgtttgtcatcggctggaaccagtgtgtgtaatgtgtcgcaccgttttcagtagcccattctttcattgcaactgctacggaatttgcaacgtccagttccagatgagttccgttttcaattgttttctttaatgctttgtacatgtcctttggcagtttgcttcgcatcactttgtcattgaatacaaggctgccatacatttcagggatactctgtgccatataggtacactcctttcgatttcactcattcattataatttttaattattttataaggaccgctgccagaagaaccgggtataaacggaccggaaaacaaaaaaagcgcttcagatacttgccgtatccaaagcgcctttgctttatgtgttgcagtatacaccaaaataaaatattgtcaagagcttttttgaaaaaatctaaaaaattgaccagggcgatcggactgtcggaaaataggcagggttgacaaatcttgtccttttattataatctgatatcgtagttatacagtcgaaaagtcagcaatcgctataagtgattgaggcaaaagaagctttttgaccagtgacaaagatgtacaatacggaaagaacagatggagggaaatatgtcaggagtaaaggaagaatgtggcgtattcgggatttatgatctggatggagggaatattgcaccatctatttattatggtcttacctcgctgcagcacaggggacaggagtcctgcggaatggccgtttcaaggacggacggagaaagaggaaacgtacagttccataaagatctcggactggtaagcgaagttttgcgaaaagatgttgtacataatatgaatggtgatatcggaatcggacatgttcgttattccaccaccggagaatctgtcgcagagaatgcacagccgctggtactttcttatatcaagggaagtctggcacttgcgcacaacggaaatctggttaatacagaagctctgaaatgggagttgatccagacaggcgcaattttccatacaactaccgactcagaggttatcgcgttccatatcgcaagagaacgtgtgcattctgccactgtagaggaagcagtacataaaaccgtagataagatccgcggaggatatgctcttgtgatcatgagcccccggaagctgatcggtgcccgtgatccttacggactgaaacccctctgtcttggaaaaagagataatgcctatgtccttgcatctgaaagctgcgcgctgacatctgtaggagcggaatttatccgtgatattgaaccgggtgagatcgtcacgatcaccaagaacggactgaaatccagtaaactgactgagaagaaaaagcatgctcattgtgtttttgaatatatttattttgcaagactggatagcaccatggatggcgtgaaaatctatgatgcaaggatccgtggaggaaaatctcttgcgaaatcctatccggtagaagcggacctggtgaccggtgtaccggaatccggacttccggcagcaaaaggctattctgaggaatccggaatcccgtttggttttgcgttctataaaaacagttacattggaagaacttttatcaagcctacacagcaggagagagagtccagtgtccatctgaagctgagcgttctggaatccgtggtgaaggggaagagaatcgttctggtggatgattccattgtccgcggaactaccattgccaatctgatccacatgctgaaagaagcaggagcaaaagaagtccatgtacgtatcagctccccgccatttttacatccctgttattttggtaccgatgtgccgtccaatgaccagctcatcgcagcacagcacagcacggaagaaatccgtaagatgatcggtgcagactccctgggttatatgcagatcgattatctggaaggcatggcaggtggacttccgctgtgtaaagcatgttttgatggcaattatccgatggaaataccggcagaaatcaaacaggattaatgaactatgtggaattaatctcacagtaaaaaataatggattgaaaaacgaaaatgtaaaaactgcacaataaatatataaaaaacccggattttgtcatataaaatccgggtttttatagaaagactcttaaaaacgataaaaaacatcaacttgacaaatctgacaacatgagacataatgtggaacagccagatgaaaaaggccgctggtctggaatatacaggaaaacagcaaggccgaaaaaaggccggttttttgccgagataaaagagaggatgatatttatgtctaaaaaaattagattgaatgcgacagaggatgttaaagaatttgttaaggctgcaagtaaatgtgattttgatgtagatatttcatataacagaattttaattgatgcaaaatctattcttggaatcctcagcatggatctaaccagagttcttacagtaacctgtcatggcgagaatcatgagtttgatcgtttccttcagaaatatgcagttgcctgacagacagtgcagagacagacaagatatgaaagacataaaaagaaaaggcagacgtgactgcagagacaggagatcagtttgaaatcctcagcaggcgtctgttttttctttgcatccatttcataggaagaaattccacagactatatgaaaaatcagttattgacaaataaaaaaaaatagtttatagtaaaccatattttatatgaaagataactgacaaaggcgtcaggaacggataccacaggggaattctcaccccttggaatctgttcctgacgcctttttgttgtggaacacaaaatggaggaggaaatcgaagatggcagtaaagtatgtttttgtaacaggtggagttgtttccggtctgggaaaaggaattaccgcagcgtctcttgggcgccttctgaaagccagagggtatcaggtgaccatgcagaaatttgatccctacattaatattgacccgggaactatgaatcccattcagcatggagaggtttttgtaacggatgacggtacagagactgaccttgaccttggacattatgagcgtttcattgatgaaagccttgacaaaaattccaatgtgacaaccggtaagatttactggtctgttcttcagaaagagcgtcatggtgatttcggcggaggtaccgttcaggtgatcccgcatattaccaatgagatcaagagccgtttttacagagcaaaatccgcagacgaagacagaattgcgatcatcgaggttggtggtacagtcggtgatattgagagccagccgttcctggaatccatccgtcagttccagcatgatgtgggacatgacaatgcgatccttatccatgtaactctgatcccgtatctccgtgcttccggagagatgaagaccaaacctacccaggccagtgtaaaagaacttcagggaatgggaatccagccggatgtcctggtatgcagaagtgagtatcctcttaccgaggatatccgtggaaagattgccctgttttgtaatgtgcctgtaagcaatgtgcttcagaatctggatgtggaatatttatatgaagctcctcttgcaatggagagagaaaagcttgcagacgtagtactgcagagcttaagactggagaatcgcaaaccagatcttacagactgggaaaatatggtagaaaatctccgccacccggataaaacagtaaagatcgccatggttggtaaatatacacagcttcatgatgcatacttgagtgttgtggaagcactgaagcatggcgggatctcttgccgtgcaaaggttgatatcacctgggtggactccgaagaactcaatgaaaaaaatttggatcagactctccattctgtagatggaatcctggttccgggaggattcggaaaccgtggtacagaaggaatgatccttgcggcacagtatgcaagagttcataagatcccataccttgggatctgcctgggaatgcagatggctattgtggaatttgcccgccatgtgcttggatatgaagatgccaacagtattgagctggcaccggaaacaacacatccggtcattgccctgatgccggatcaggaggatgtggaagatcttggaggaactcttcgtcttggaagctatccgtgtgtgcttgcagaaggctccagatcctatgagctttttggaaagaaagagatccaggaacgtcacagacatcgttatgaggtaaacaacgcattccgtaaggaactggacgaaaagggaatgtccattgtaggaacatccccggatgctcacattgttgagatgatcgaaattgccggacatccgttctttgtgggaacacagggacatccggaatttaaatccaggccaaaccatgcacatccactgttccgtggatttgtgcaggcggcagttgataaaaagacggcagaagaagctgcaatgaaaggatgagaaaaatgagagaagtagcaaatcagcagcagggcctctaccgccctgaatttgaacatgataactgcggtatcggagccgttgttaatataaaaggaaagaaaacacatgatacagttgccaatgctcttaagatcgtagagaatcttgagcatcgtgctggtaaggatgcagaaggaaaaaccggtgatggtgtcggtatccttcttcagatctcccacaaattttttaagaaggtctgtaaaaaagaaggctttgatatcggcggagagagagaatacggtgtagcccagctctttttcccacagcaggagatcaaacgtgcccaggcaaagaagatgttcgagatcatcgtggaaaaagagggtctggagcttcttggatggcgtacagtaccggtcttcccggaggttcttggtcataaagcgaaagagtgcatgccgtgcattatgcaggcatttgttaaaaagccggaggatgtggaaaaaggtcttgcctttgaccgtatgctttacatcgcacgtcgtgaatttgaacagagtaatgataatacttacgtagtttccatgaacagccgtaccatcgtatacaaaggtatgtttctggtaggacagctccgtaccttctttggcgatcttcagagccaggattacgagtctgccattgcagtggtacattcccgtttcagtaccaacacgaatccaagctgggagagagctcatccgaaccgtttcatcgtacataacggtgagatcaacacaatccgcggaaacgccgataagatgcttgcacgtgaggaaaacatggagtctccgtatctgaaggatgagcttcacaaggtccttcctgtagttaaccgtaatggttctgactctgcaatgcttgacaataccctggaattcctggttatgagtggaatggatcttccacttgcagtgatgatcacgattccggagccatgggcaaacaacgatacgatctctcaggagaagagagatttttatcagtactatgcgactatgatggagccatgggacggtcctgcgtccattctgttctcagatggtgatgtgatgggagcggttcttgacagaaacggtcttcgtccatccagatactatatcacatcggatggctatatgatcctttcctccgaggttggtgttcttcctgtggatgaggagaagatcgtattaaaagaacgtcttcatccgggaaaaatgcttctggttgataccgttcagggtcgtgtcattgatgacaatgagctcaaagaaaaatatgcgaaaaaacagccttatggtgagtggctggacagcaatctggtacagcttcgtgatatcaagatcccgaatcagagagttgtcgaatacactccggaggagagagcacgccttcagaaagccttcggatatacttatgagcagtaccgtacttcgatccgaaacatggcattaaacggcgcagaaagcatcggagccatgggacatgatactccccttgcagtattttccaaggaacattatccgttgttcgattatttcaagcagctttttgcacaggtaacaaacccgccaatcgatgcgatccgtgaagagatcgttacttctacaagtgtatatgtaggaaaagacggaaatcttctgatccagaagccggagaactgtcaggtgctgaagatcaacaatccgatcctgaccaacaccgatatgctgaagatcaagaatatgaaaaaggacggcttcaaggttgtaacactttctacattatattataagagcacaaagcttgaacgtgccattgaccgtctgttcgtagaggtagacaaagccttccgtgagggcgcaaacatcctggtcctttctgaccgcggtgtggatgagaaccatatgccgatcccgtccctgctggcggtttccgcagtacatcagcatcttgtaaaaacaaagaagagcacttcccttgccctgattctggagtccggtgagccgagagaggtacatcatttcgcaacactcctcggatatggtgcaagtgcagtcaatccgtatctggcactggatacgatccatgagctgatcgatacacatatgctggataaggactattacgcagccgttgatgattacaatcatgcagtgatcagcggtatcgtaaagatcgcttccaagatgggtatttccactatccagtcctatcagggatctcagatctttgaggcaatcggaatttcccaggatgtgatcgatcgttactttacaggaaccgtaagtcgtgtaggcggaatcacattggaagatatcgaggataatgtagaaaaacttcattctgaggcatttgatccccttggacttgccacagatcttactctggacagcgtaggtgcccataagatgagaagccagggtgaggagcacaaatataacccgcgtaccattcatcttctccagcagtccacaaaacagggcagctatgagatgttcaaggaatatacaaagctggtggatgacgagggtcatggaaacttaagaggtcttctggactttaagtttgccaaggagcctattccgatcgaccaggttgagagtgttgaggatattgtaaaacgatttaagacaggtgccatgtcctacggttctatttctcaggaagcacatgagacattggctattgccatgaaccatctccatggaaaatccaataccggtgagggtggtgaaagtgatgagcgtctggattccgcaggaacagacaatgaccgctgctctgcgatcaaacaggtagccagcggacgtttcggcgttaccagccgttatctggtttccgcaagagagatccagatcaagatggcacagggtgcaaagccgggtgagggcggacatcttcctgcaaagaaggtatatccgtggatcgcaaaaacccgtcattccacaccgggagtcagcctgatctctccgccgccacatcatgatatctattctatcgaggatctggcagaattgatctatgacctgaaaaacgccaataaatatgcggatatttccgtaaagctggtttctgaggcgggtgttggtacggttgcagccggtgttgcaaaggccggtgcacagactgttctgatctccggatatgacggaggtacaggagcagcgccaagaagctctatccataatgcaggacttccatgggagcttggacttgcagaaacacaccagacgctgatcatgaacggacttcgtaaccgtgtacgtatcgagacagacggtaagctgatgagcggccgtgacgttgccattgcagcacttctcggtgcagaggaattcggttttgcaacagcgccacttgtaacgatgggatgcgtgatgatgagagtctgcaatctggatacctgcccggtaggtgtggctacacagaacccggagctgcgtaagagattccgcggaaaaccggagtatgtggagaacttcatgcgctttattgcacaggagctgagagagtacatggcacgccttggtgttgccaccatcgatgagatggtaggtcgtacagaccttcttacagtttctgacagtgtgcaggagccgcataagggtaaggttgacttaagtgccatcttgaataacccatatgcaggaaagggcaaagtaacctttgatccgaaggctgtatacaatttcaatcttgagaaaactctggatgaaaaagttctggtcaagaaatgtgcaccggcgatccagaagggtgagaaagtttctgttgatgtaaatgttaccaatacagaccgtgcatttggtaccatcctcggatctgagatcacaagaaatcataaggatggacttccggaggatacggtaactgtaaactgtacaggtgcaggcggacagagcttcggtgcctttattccgaaaggactgacattgaaactgaccggtgacagcaacgactacttcggaaaaggcctttccggtggaaagctgatcgttaaggttccggagaaggccggatacaaggctgaagagaacatcatcgtcggaaacgtggcactctatggtgcgaccagcggaactgcatttatcaacggtgttgccggtgagcgttttgcagtacgtaactccggtgcggttgcagttgttgagggtgttggcgagcatggctgcgagtacatgacaggcggccgtgtggtagttcttggaaaaacaggaaagaactttgcagcaggtatgagcggcggtatcgcttatgtccttgatgtggataacgttctttacaagaacctcaataaagcaatgatctccattgaaaaagtggataataaatatgataaaaaagagcttcgtgatcttatcgaggctcatgtggaagcaacaggctctgagatcggtaagaaggtgctggctgattttgattcctatctgcctcacttcaaaaaactcattccggatgagtacaagagaatgatcacattaagtgcaaagctggaagaaaaaggtctgaccagccagcaggcacagatggaagcgttctatgagagcatcggcgtgaaacattaaggaggatgaggaaatgggaaagccaactggatttttagattatgaaagagaaacggcaaaggttctgccgccaaaggaacgtattcagaatttcaacgaatttcgtattccattaaataaagaaaaacagaaacttcagggagcacgctgcatggcctgcggcgtccccttctgccagtcaggtatgatgatcggcggaatggcttccggctgcccgctgcacaacctggttcctgagacaaatgatcttgtgtacacaggaaactggaagcaggcattccttcgtttaaacaagacacacagctttccggagtttacatccagagtgtgtccagcactttgcgaagctgcatgtacctgtaacctgaacggagatccggtcagcacaaaggagaatgagaaagcgatcattgagacagcctatgcagaaggatgggtaaaaccgcagatcccgcctgtccgcacaggaaagacgatcgcagtcatcggaagtggtccttccggactggcagcagcacagcagctgaaccgccgtggccacagcgtaaccgtatttgagagaaacgaccgtatcggaggacttctccgctacggcattccgaacatgaagctggagaaaaaggtcattgaccgcagactgaagctgatggaagaggaaggcgtgaaatttgttaccaatatcaatgttggtgttgacatcactgcagaacagcttttgaaggattatgaccgtgtccttctctgctgtggagcttctcatccgagagatatcaaggttccgggaagagatgctaagggaatttactttgcagtggatttcctgaagcaggtaacaaaaagtcttctggatacagattttgcaaaattcccatatgagcttgcaaagggcaaaaatgttctggtcatcggcggtggtgataccggtaatgactgtgtgggaacatccatccgtctgggggcgaaatctgtaacacagcttgagatgatgccgcagcctcctgcagcaagaactccttccaatccatggccggagtggccgaaggtcctgaaaaccgattacggccaggaagaggctattgcagtattcggccatgatcctcggatctatcagacaaccgttaccgagtttatcaaggacaaaaaaggaaatgtctgcaaggccaagatcgtaaaactgaaaagcgtaaaggatgaaaagaccggaagattcaatatggtaccggttgagggcagtgaggaagtgatccctgcagatgtggtccttattgcagccggcttccttggcagcgagaaatatgtgacagatgccttccgtgtagcgcttacaccaagaactaatgtggaaacaaaaccggagcagtatgcaacaagcgtagatcgtgtgttcacagcaggtgatatgcatcgtggacagtcccttgtcgtatgggcgatccatgagggacgtgaggctgcgaaagcagtggatgaatcactgatgagctattcatatttacagtaaaataacagataccaggggcaaaaggtcaaaaaaactgttcgtgtttccgcgataaagcttttgaacttttgccccttttaaaaaatggttgacaaagaattgaccgattgctataattacgtccatgaacaagggtgttcttcaggagcggaagctctctgaagtgcaccctttttctgattttgagggtaattattttgtgtgatgaggaaataaaggagagaatactatggggaattataccagagaagagattcttgcaatggcagaggaggaagacgtagagttcatccgcctccagtttacagatatgtttggaactctgaaaaatattgcgatcacagcaagagagcttccaagagccctggataaccagtgcgttgtatatggctctcatattgcgggcattgtgggagagaaggagccggatctgatcctgtatccggactatgataccttttcaattctcccatggcgtcctcagcagggaaaggtcgcaagactgatctgtgatatgcgccgtgcagatgggtctgagcatgagatgagctccagatatattctgaaaaaaacagcgcaggcagcagaggaggcagggtatacctgttatgttgacccggaatgcgagtttttcctgtttcatattgatgataacggaatgcctacaacggtttctcacgaaaaggccggatatctggatgtaagtccggtggacttgggcgaaaatgcaagacgtgacatggtactgactcttgaggatatgggatttgaggtggaatcctctcatcatgagacagcacccgcacagcatgagattgcccttcattacggggaagcgcgtgagatggcagacgaagttataacctttaagatggcggtaagaactgtagccaaacgtcatggacttcatgcgacatttatgccgaagccaagacgggaagtaaacggttcagccatgcatatccatttttcgctgtttaaaaatggaaaaaatattttcgtggatccggaggatccgaccagattaagtgaagaggcatactattttatcggaggtcttctggctcacagccgtgagatgactctgatcaccaatccgcttgtaaattcttataagcgtcttgtacctggatttgatgcgcctacagagctgacctggacgagaaataaccagaattcactggtaaggatcccgagagtcaatggtgctgataccaggatcgagcttcgaagcccggatgctgcatccaacccataccttgtttttgcggtatgcctggcagcgggcctggatggaatccagaagaagatctatcctacaaaagcttctaaccgttctctttccgagtcggatcagaaggaacagggtatcgagaatttaccggagaacctgcgggaagcgatcacactgtttgaggacagcagctggatgaaggaaatccttggagaagctttctgcaaacagtatgcgcaggcaaagagaaaagagtggctgcgttattcccaggagatttccgactgggagatcgaggagtatctgtatcggatctgatgaacgaggcataatgggacgaaagagagtggcggcttatgaacacgagtatcgtgattgcattaccgaaaatagaagatgcaaaaaagatccgcacagtccttaaccgatatggattcacggtggcggcagtatgcaattcaggtgccaatgcccttgccagtatctcggagcttgatggcggcgttctgctttgcggttatcatcttcaggatatgtactaccgtgatcttctggactatatgccggattattttgaaatgctgcttatggcttcccggggagtgatcagtgaggcgccaacatccattttatgcgtgggaatgcctctgaaagtcggagatctggtaaatacggtaagcatgatgctttcccagatcgaaaggcgttggaaaaaagataagaaaaagccgaagcagcgttcatggaaagaacagaattatatttcaaatgcaaagatgcttctaatggaaagaaatcacctgagcgaggatgacgcataccgctatatccagaaatgcagtatggattccgggaccaatatggtggagacagcccagatggttctgatgcttttatatgattctatgtaaaaaacaacaaaaaacagcagagcggacaggaatgatctgttctgaatgactgatatcacaccggatcgggaaaaattccgcaggggatttcctgattcggtgaaactactttgaattggaggatgagggaatggaatttatggatggaatctgtaagactagagaatgtgcctgggatgtgcttctttccgagagcatgaaagaccaggaagcaatagtggaaggtgcaatacacagcatccgtaatatgggtgacgtggcatttgtgatacttcgaaaaaaagaagggctttttcagaccgtatatgaaaacgacaagacaaatgtttccattcatgatctgaaggaggcaatgtgtgtgcgcctcacaggaactcttcatgaggaagaaagagcgcctcacggaagagaactccgcatcagccatgtggagatcctttcctcacctgcagagcctcttccgctggccatcgacaaatggaagctgaacacttccctggaggcaaagctgaattatcgtcctatcgccctgcgtaatgtgcaggagcgtgcaaaattcaagatccaggaggctctggtgcgggcatttcgtgattacctctatgagaaggggttcaccgagatccacacaccgaagatcggagccagaggtgcagagggtggtgcaaacctgttcaagctgagctatttccataaaccggcagttctggcacagagcccgcagttttataaacagatgatggtaggtgtttttgaccgtgtatttgagaccggtcctgtattccgtgcagagaagcataacacaaaacgtcatctgaatgaatatacaagccttgattttgagatgggctatatcaacggatttgaggatatcatggagatggaaaccggatttctccagtatgcggtagaacttcttaagaaagactacgctcatgagctttccattctgaaggtggagcttccgaaggtggacaagatcccggcagtacgttttgacaaggccaaagagctggtagctgaaaaatataaacgtaagatccgcaacccatatgatctggagccggaggaagaagcgctgatcggaagatatttcaaagaagaatatgatgctgattttgtttttgtcacacattatccgtctaagaagcgtccgttctacgcaatggatgatccgtcagatgagaaatttacattaagctttgaccttctgttcaagggacttgaggtaactacaggcggacagcgtatccatgattatcagatgctgaaggataagatcgcagcccgtggtatggatgaagagggtatggagcagtacctggataccttcaagcatggaatgccgcctcatggaggacttggaatcggactggaacgtcttaccatgcagatcctcggagaagaaaacgttcgtgagacctgtctgttcccacgtgatatgaacagacttgagccgtaataaggagaaaaaagatggcaaagataatcgatgatgaaacaatggaaaatgtctgcatccttgcaaagctttctctgacagaggatgagaaggaaaaagcaaaagaggatatgcagaagatgctggactatgtagacaagctggatgagcttgacacctcttccgtagagcctatgtcccatatttttgaggacgaaaacgtattccgtgaagatgttgtgacaaacggagacaaccatgaggcgatgcttgccaatgcaccgaagcagaaagaaaaccagtatcaggttccgaaaacaattggataagacaggagacaggacatggatttgggaaaattaaccgcattacagcttgcggaaaagatcaagcagcatcagataagcgtcctggacggtgtgaaatacgtatttgatcagatcgaagcaaaagaggacaaggtccacgcttatcttgatacttacaaaaaagaagcctatgcaagagcaaaagaggtacagaagggcattgaggatggaacctatacaggacctcttgccggtgtacctattgcaattaaggataatatctgcattaagggaaaaacaactacctgtgcatcaaagatccttgagaattttgtgccgcagtacaatgccgaggttattgaccgtctggaacaggcgggtcttgtgatcatcggaaagacaaacatggatgagttcgccatgggaagtaccacagagacatccgcttacggcgtcaccagaaacccgtgggatctggagcatgttccgggcggatcttccggcggctcctgtgcggcagtggcagcaggggaaacttacctggcactgggttctgataccggcggttccatccgtcagccaagctcctactgcggtgttaccggaatcaaaccgacctacggaacagtatcccgttacggactggttgcctatgcatcctctctggatcagatcggaccggtaggaaaggatgttgcagactgtgcggcacttcttgagatcattgccggacacgatgccaaggacagcacctccatgaagagagagaatcttgatttctccgcttctatgacggataagatcgtgggaatgaaattcggcgtgccgaaggaatatctctcagagggactgaacccggaggtaaaagaggcttttatgaatacgctgaagagccttactgagatgggcgcagtggtagaatttttctccatgaagacaacagaatatatgatccctgcctactacatcattgccagcgcagaggccagctccaatctggagcgctttgacggtgtgaagtacggcttccgtgcaaaagagtacgagggacttcatgatatgtacaagaagacaaggactgaaggtttcggcgaggaagtaaaacgccgtatcatgcttggctcctttgtgttaagctccggttactacgatgcttactatctgaaagcacttcgcacaaaagcccttatcaaaaaggaatttgatcaggccttttccaaatatgacgttcttcttgccccggcatcaccctttacggcgccgaagctgggagagagtctgaaagatcctcttgccatgtatcttggcgatatttatacggtagcagtaaacctgtgcggacttcccggaatcacagttccatgcggaaaagacgcagcaggacttccgatcgggatccagatgatcggtgactgcttcaaagaaaacaacctgttccgcgcagcacacgcctatgagaaaaaacgcggtgatttcggaacagcaatggaagggggagaaaaggtatgaaacagtatgagacagtcataggacttgaggtgcatgtggagcttgccacaaaaacaaagatcttctgcggatgctccacagaattcggaggcgcaccaaatacacatacctgcccggtctgcaccggtatgccgggctctcttccggtcctcaacaaaaaagtggtagagtttgccatcaaggcaggtcttgcggcaaactgtcatatccatcagtactgtaagtttgaccgtaagaactatttttacccggataacccccagaactatcagatctctcagctgtatctgccgatctgctatgacggagctgttgagatcgagacttccgcaggcaaaaagactgtacgtatccatgagatgcatatggaggaggatgccggtaagctgatccatgacgagtgggaagactgctccctggttgactacaaccgaagcggggtaccgctgatcgagatcgtatccgagccggatatgagaagctccgaggaggttatcgcttatctggaaaagctccgctgcaccatgcagtatcttggagtttctgactgtaagctccaggagggctccatgcgtgccgatgtcaatctttccgtccgtgaggtgggaagtgagaccttcggaacaagaacagagatgaagaacctgaactccttcaaggccattgcgagagcgatcgaaggagagagagaacgtcagatcgagcttctggaggaaggcagagccgttgtacaggagacaagaagatgggacgataacaaagagtcttctcatgctatgcgttccaaggaggatgcaaaggattaccgttacttcccggacccggatcttccgccgatccacatttccgatgcatggatcgaagagctgcgtacttccattccggagcttcgtgaagccaagatggagcgttatcagaaggagtatgagcttccggcttatgatgcagggatcctgaccgaatccagacatctggcaggactttttgaggagacagcagttcttctcggaaacccgaaaaaggtggcaaactggtttatggtggaggttctccgcctgacaaaggacaagggccttgatccggaaagggtaagctttaccccgaagcatctggcagaccttctttccatggtggagaaaaaagaggtcagcgcacagaatgccaagaaagtatttgaaaaagtgtttgacgaggatattgatccggttgtatatatagaagagaatggtcttaagatcgtagaagatacaggccttctcaccgaaactgtgaaaaagatcgtagatgcaaaccctggaccgctggcagagcttctgggcggcaaggataaggttatgggattttttgtaggacagctgatgagagaactgaaaggcaaggcaaatcctgacagcgtcagaaaagcactggcagaggaaattgagagaaggagataaaatactatggttacagtaaatcagaattatttaaaacttccgggaagctatctgttttccaatatcgcaaagaaggtaagcgcatataaggaggccaatccggaatttaaggattctgtgatcagtcttggaatcggtgatgtgacacagccccttgcaccggcgatcatcgatgcccttcataaatccgtagacgaaatggcacacgcagaaaccttccacggatatgctccggatctcggatatgagttcttaagaagtgccattgcaaaaaatgattatcagtccagaggctgcgacatcagcgcagacgagatctttgtttccgatggagcaaaaagtgattccggaaacatccaggagatcttcggactggataacaaggttgcagtttgcgacccggtttatcctgtatatgtagatactaacgttatggctggacgtactggcctttataacaaagagcgtgagaactttgacggtgtgatctacatgccctgcaaagaggagaatggtttccttccggagattccggcagatgaggtaccggatctgatctatctctgcttcccgaacaatcccaccggtggtgctatcacaaaggcagctcttcaggagtgggtcgactacgccaacaaaaacggctgcgtgatcatctatgatgcagcatatgaggcatatatttctgaggaggatgtcccgcacagcatttatgagtgcgagggtgcgagaacctgtgccatcgagcttcgaagcttttccaaaaatgctggctttacaggcgttcgtcttggatttactgttgttccgaaggaactggtgcgtgatggcgtagagcttcacagtctctgggcaagacgccacggaaccaagtttaacggtgctccgtacattgtacagagagcaggcgaggctgtttactctccggagggaaaagcacagctgaaggagcagatcgcttattacatgcgtaatgcaaagacgatcctcgagggcctttccgcagcaggattttccgtgtccggtggaaaaaatgctccatatatctggctgaaaacaccggatcagatgacctcctgggagttttttgattatctccttgagaaagcacacatcgtaggaacaccaggttcaggctttggtgcacatggtgagggatatttccgtctgacagcattcggaagctatgagaatactcttgaggcaattgagagaattaaaaatctgtaatatgagtataaattgcggagcaggtctttgtaaaagagctgcttcgtttttttaccgaatcaaagaaatattctgcttcattgcgaatatccacttgatctggatcaaagaagctcccggcagggttgcgaaaagcaataagcagtgggaaaaatttgcctgtaagttaatttgtgaaaataacaataaggattgcgaaaatttatcatatcatttataattgtacaggaagtaaggcacaggccgcagaaagcctgtgttcataaaatttcacaaatttacgcaatcacgaaaggggattttatcatgggtatcagaagagtagaaaatatgtgcggcggtaaaggccatgtgatcatcaaagacattcttgagggagacgagctgaagggaaaatgcggactttacgcacaggttaccatcgaaaaaggatgttctctgggataccatgagcatcatggcgagacagaaacctattatatcttaagcggtgaaggcgaatacgacgataacggcgtgaaacgcccggtaaaggccggcgacatcaccatcacaccagatggaaaaggacacggtcttaccaatacaggcgacacagatcttgtgttcatggcactgatcatttttgactgatccatatagaagaaaacagaagtgagacagaagggcagcctttttgaagaggctgctctttttacgactgaggcgtaacctgtgtcggagtataaattctgggatgaaagattctctgtctcagattgttattaaacgaaatgtattaattgtataaacaaaaaatatttttggatttttttagaaaaaaactgttgacatacaaaaagcactttgctatactatcacttgtcgcgagggagaagataaagaatcccgaagaaatgcgatatgcggaagtgtcggaactggcagacgagcaagactaaggatcttgtgagcattgcgctcgtgtgggttcaagtcccatcttccgcattttttatttaggaaacctgcatctggaaacggatgcaggtttttttgttacctaaaaatatctgtaaaaaaggaatccggatagaatatatcgtgtttatatgttatggtagaagaaaatggaaggagcatagtcatatgagaagaaaaagtgcaggaaaaaagctcatggccgtacttatagcggcaagcctggcgctgactccggcagagctgacagtggcggcagaaatggaaccagagggtgaggaagcagcatttttggcagaagaaagtggagatactgcatcctcagatccggaagatactgcagagacggaaacagagatcacagatggatcagctgctacagaggaacaggaaaccacagatacagacaagccagataccgggaacaacgtacaggagaatgcggaaacaggcgcaatggagtctggtgaagaagcaccagagggtactgcagaagaggaagatccggagactccggaagcggcaatggatgcagccgaagcgttggaggaatgcgaacaggaagaagaaaacgcagcttttgatgatggaacgaaggatgcagtgcaggcatctgcagaatactctgatggaaaatttacgtgggtactggacgggaatggaacactgaccattacgggaaataacatggagttgacaaaaaatgagatatctgaaagtgctttggagaaggcaggcatcgatttttctagagtaaataagcttgtaatcgggaatgggatcacaggctttgatagatggggcatgtggaatctgaaaaaatatattaaggaactggaaatccatggaaatgcaggcatgaatatgccggagcaatgcttttacgatgtgccaaatatagagagtgtggtgatatccggtgcagtggatgtgccgggagatatgtttggaaaatgtaccgagctgaaaaaggttacattaaaaaatggagtgaggtctattggagaggatgcctttcgagattgcagcagtctggagagtgtgatatttgagaatacagtattggaaaaaatcagtgacggagcattttggggctgcagtgcgctgagttctattgcgttaccggattccgtaacagaaatagaaaggaatgcatttttcgagaccggactcagaaatatccagcttccggaaaaactgacgctgataggaggaggggcattttgtaactgcaaaaatctgaagcaggtacagcttccgcctcaattaaaagagctgggtgagggtgcattttttaactgcgaaaatctggcacagatccagcttccgtctcagttaaataaattaggaggagatgcattcagagattgtacatccttggataagattgacatacctgccggtctgaagcagatcgagtctgccacattttgcaataccgggctgaccagtgtgaccttacatgagggactgactaagatcgaagattgggcgtttcatgattgccttaagctgaaaaagatccgtattccgaaatcagttacagatattggcgaactggcattaggaatacgttataacatgggaaatggtgcagaggaagttattcccggtggttttacagtagaaggttatacaggctcggcagcggaacgatatgtaaagagaatgcatcaaagtgaaaatttatatcatgtattttttaaagatgtgaaatttgtttccattggtggacagactgcagcggttaccaatatcagcaaaacaaagatatccgcacttaagaccagggcctttaccggaaagccactgacccaggcactcaccataacctatggcggtaagaagcttgtaaacggaagggattacacccttacctggaagaataataaaaatatcggaactgcatccgttactatcaaaggaaaaggaaaatataacggttctgttacaaaaaaattccggatcacggttcagaaaaacgcggtctatacagtcagcaggctgaaatataagatatccagtgcagacacatccggcaagggaaccgtagtctttaccggagctacggacaaggcagcaagaaaggcccttacgatcccgacgacagtaaagattggtggaaagagctttcgtgtaacagccattggcacctctgcaatgtccggagcgaagaagctgacaacagtgaaaatcggagcgaatataatgacagtaggtgcgaaagccttctacggctgcagtaaactctccaatgtaacgatcttcggcacaaagcttacgacagcgaagaccggagccaatgcatttaaaggaattcgctccaattgcagatttaaagtaccggcttccagggtaagtgcatacaaaaaactcctccgtgcaaagggtgccggaccaaagataatcgtgacaaaataacagaaaaaccgaaaaaatagaaaacttttgaaaaaaggtgttgacatacaagatccactttgctatactatcacttgtcgcgagggagaaaataaaaaatcccaaggaaatgcggtcatgcggaagtgtcggaactggcagacgagcaagactaaggatcttgtgagcattgcgctcgtgtgggttcaagtcccatcttccgcattggaaatttccaatgaaatgcgatatgcggaagtgtcggaactggcagacgagcaagactaaggatcttgtaagcattgcgcttgtgtgggttcaagtcccatcttccgcatgactttaaaacagagctgtgaattgcagctctgtttttggctatatgaaagtaaattattgcatgcctgcactggtgagaagctgaaatgggaagatctgcgtgatatatttgtattcgtttcatatacaataggataattttggacatcttaagggctgatcagaccgtaactccaatattttttgaattattttttcagaaaagaggaatttgtggttttgtgtagaatataattaacagagggtattttgtcgccgctgtttgtcagactgtggaggaaatgcttatgaacatcagagagagcatggaacagagagaacgggagcttttgagcccttatgcttctcacagcgcagataccagaggccgggagcacccggaagaggaatgcgatgtgcggacaacgtatcagagagacagagacaggatccttcattgtaaggcttttcgccgtatgaaggataagacacaggtgtttctggcaccacagggagatcattaccgtaccaggctgacacatacactggaggtatcacagatcgcccggactattgccaaggcacttcgcttaaatgaagatctggtggaagcgatcgctctgggacatgatctggggcatacgccttttggacatgcaggagagagagcactggatcaggtacatccgggtggctttgcacactataagcagagcgtccgggttgtggaagtactggagaagaacggaaacggactgaaccttacctgggaagtccgcaacgggatcatgaatcaccgcaccagcggaaatcctttcacactggaaggacaggtggtacgtttttctgacaagatcgcctatatccaccatgatatggacgatgcccagcgggcagggatcatcacagaagatgatattcctgtcacaatgagaacttttctgggctataccacgagagaacggctgaatactttcgtacataatattatagagaacagtatggggaaagacagcatctccatgtcgccggatgtttttgaggcgatgatggagcttcgggcgctgatgttccggaatgtctatgagaatccggttgccaggaaggaagaggataaagtgatccagatgctgagtgaactgtacggatattatactgaccatccggaggcaatgtcccgggaatacagggaactggtggaataccggggagtacctaaggaacaggcagtatgtgattatatttcgggaatgacggatcagtattccatggagaaattcagggagatctatataccgagagcctgggaggtctattaaatggaaaagagggataagcatgcgttattcagatgacatcatagaagaagtccgaatgaaaaatgacattgtagacgtgatatcccagtatgtgaaactgacacggagggggagttcctattttgggctgtgtcccttccataatgagaaaaccccttccttttccgtaacaccatccaagcagatgtattactgctttggctgcggagcaggaggaaacgtatacaattttatcatggaatatgagaattactcgtttggtgaggcactgtcacatctggctgaccgggcaggggtagagcttccgaagatcgagtattccagagaagccagagaaaaagcagaacagagagcaaatcttctggagatcaacaagctggcagcgcagtacttttattatcagctccggagagaaggcggaaaggcggcttacagatatctgacaggaagaggtctttccgaggaaaccatccgtaaattcggtcttggatattcggacaagtacagtgatgatctgtacaaatatcttaagggtaagggctacagtgatgaacttctcagggaatccggcctgttcaatgtagatgagcggcgaggcatgtatgataagttctggaaccgtgtgatcttcccgatcatggatgtaaacaaccgggtcattggtttcggaggtcgtgtcatgggagatggcaagcccaagtacctgaattcgccggagacgaagatctttgataagagccggaatctttacgggctgaatgtggccaggaccaccaggaagaattatctgatcctctgtgagggatatatggatgtgatcgccatgcatcaggcaggctttaccaatgcagtggcgtcgcttggaactgcactgacctccggacatgcaagtcttgtgaaacgttacaccaaggaagtcctgcttctttatgacagtgacggtgcagggatccgggcggcacttcgtgcgatcccgatcctgcgggaggcgggagtcacgtccagggtagtaagcctgaagccctggaaggatccggacgagttcatcaagaatgaaggagcggaggcctttgaggaacgtctgaaccgggccatggacagctttatgtttcgtgtacatattgcggaacaggaatttgccatggatgcaccccagggacagaatcagttttttgagcggtgtgccgggatgcttctggagctttccgatgaactggagaggaatctttatatagaagccattgtaaaggaatacggccgctatggagtgggcacggaggatatccggaaaagggtcaacacgctggctctgaagggaacgcctgcagagaaacggatccagccaaagtccgggactccggaaacaaagaaaaaggaatccgccgcagacaaagcacagaagctgatgctgacctggcttgtaaattatccgggtatttttgaacaggtggaaaaatacatttccccttccgattttgtggtaccgctgtataaagaggtagcccagatgctgtttgaacagcataaggagggagagaccaatccgggaaagcttctcaacgcctttacagacagtgaggagcagcgggaggtggcatctctttttaacgccaccattcatctggaaaacgaaggagaacagcagagggctttttccgatgcgctgctgcggatcaaggaagaaagcctcaaagaaaaaaaccgtacctgggacccgtcagacatggccgggcttcaggaactgataaaagcaaaaaaagaactggaagaccttggaagaaagaggcagcagctgcatatttctttcaattaaggataaaatataaacactatatggaggtatagagcacctatggaaatgaatatggcaaaattcagcgagaaacttgtagagcttcttgaacttgcaaaaaagaaaaagaatgtgctggaatatcaggagatcagcgactttttcaaggactctccactggaagtggatcagatggagaaggtttttgacttcctggaggccagcggtgtggacgttctccgtatcacagaaaacagcggtgacgaactcctccttgataacgatatggatatggatgggatggaagatgaagaagaggtagagcttgataagatcgacctctctgtaccggaaggtgtcagcatcgaggatccggtccgtatgtacctgaaagaaatcggtaaagtcagtctgttaagtgcagatgaggagatcgagcttgccaagagaatggaaaagggggatgaagctgccaagaaacgtctggcagaggccaatctccgtcttgttgtcagcattgcaaagcgttatgttggacgtggaatgctgtttctcgacctgatccaggagggaaatcttggccttatcaaagctgttgaaaaatttgattacagaaaaggctacaagttcagtacctatgcaacctggtggatccgtcaggctatcacaagagccattgcggatcaggcacgtaccatccgtatccctgtgcatatggttgagaccatcaacaagctgatccgtgtttcccgtcagctgctccaggagcttggacgtgaacctacgccggaggaaattgctgaggagatggacatgccggtagaccgtgtacgtgagatccttaagatctctcaggagccggtatctctggaaactcctatcggtgaggaggaagacagtcatcttggcgatttcatccaggatgataatgttccggtacctgcagatgcagctgcatttacacttctgaaggagcagctggtagaagtcttaagtacgcttactgaccgtgaacagaaggttctccgcctccgtttcggactggacgacggacgtgccagaactctggaggaagttggtaaagagttcaatgtcacaagagagcgtatccgtcagatcgaggcaaaagctctgcgcaagctgcgtcatcccagccgcagccgcaagctgaaggattatcttgactgataaaaatatatccgtacagctttccatgcgtcttcgtgccattgccggtatggtaacaaaaggaaaccggctggcagacgtaggatgtgaccatggctatctgtcgatctggcttgtcagtgaaaaaacagttccgtcagccattgccatggatgtacgtccgggaccgctttcaagagccagggagaatattacccgttatggccttgaagattacatagagacccgtttgagcgacgggcttgcgaagcttgagccgggagaaggtgataccctggtgatcgcgggaatgggtggtcctctgatggaaaggatattaaaggatggagcgaaggtccgggaggggtttcaggaactgatcctgcagcctcagtcggaccttcctcatttccggcattttctttctgagatcggctgggagatcgtaagggaagaaatgataaaagaagacggaaaattttatcctatgatgaaagcggtacgtaacaatgcgggagaaaagactgtttacacagaggaagaggcctggtttggacctctccttctgaaaaaatgtcacccggtccttaaagagtatcttctacgggaggaaatgatccgtaagaaaatacttgccggtctttccggggcagagtctgtttccgcaaaaactcgtctggcagaagtaaaggaggaaatggagctgatccatacagctctgaaacgatatgaaagcatatgaactgatcgaatggctgaatgagcaccatccgcaaaaatttgcggaggactgggataatgtgggactgctggtgggagatgaccagaaagagatttcccatgtatttcttgcactggatcttacggaaccggtgttggatgaggcggtggctgctggtgcggatatgatccttacccatcacccaatgatcttttctggaatcaaaaagatcaacaatcatacctttaccggaagaaagatcctccgtctgataaaggaggatatcccgtattttgccatgcataccaattatgatgtgatcggaatggcagatttaagcgcagagcatctgaagcttcaggatacaagggtgcttacagttaccgatggatccggggagcagccggaggggttcggaagagtgggaaagcttccccatgttatgactcttgatgagtttggaaaatatgtaaaagaatgcaatcatcttccggatgtgcgggtttacggtgatctggatcggaagatcgagacggtggcgatctgtacaggaagcggaaagagtatgatcggtgatgtaatggccgccggtgcggatgtatatgtgaccggagatattgattatcatactgccatcgatactatggcagatggtctggcaatcgtagatgccggacattacggtacggagtatatttttgcggaagctatggagaaggaactgaatgcggcattctctgcgcttaagacaacctgcgccagtgtgaaaaatccatatactgttttgtaaaagcggattgcaaaaagtgcttgtattcatgaatatgtagtgggatggaatacgattatctgtttcggaaaaatgaattgtgaaacacatggctgtccgaaaaatcgggcagctgtataaatatataagcctgtggaggggatcgttatggaacagacaatgattaaagtgaccataaacggagaaacaagggaataccccaaaatgacaccgtattctgagatcataagggattatgagggcaaaacagagtatccggtgatccttgtgactgagaacggaaagctccgtgagcttcacaagaagcttcagcatgactgtacactgggatttataaccgcaaaggacagtgccggtcgaaaaacctatcggagaagtgcgatctttattcttttgaaggcaatttttgatgtagctggaaaagagaatgtggatcatgttgtgatccattattctattggaaatgctctttattttaccatgaaaggcagtgctaccctggatcaggagcttcttgaccgggtaaaagtgcggatgcgggaactggtagaacggaagcttccgatctgcaaacgcagtgtcagcacggatgatgccgtttccatgttccacaggcatcatatgtatgataaagaaaagctgttccgttatcgacgggtttccagagtgaatatttacagcctggaaaatttcgaggattatttttacggatttatggcaccagataccggctatgtgaagtattttgatctgcagctttatgatgaaggctttgtgctgatccttccgaggcagaagaacccggatgtgctggagccttttgaaccccaggctaagatcttccatgtgcagaaggaatcggaagagtggggcgataagctggatgttgccactgtaggagatctcaatgaccggatcacaagagaaggtgtgcagagcctgatgctgatccaggaggcactccatgaggccaagatttcttcgattgccgaggagatccggagaaggggcaatgtaaagttcgtaatgatcgcaggcccgtcttcttccggaaagaccagtttttctcacagattatctattcagctttctgctcatggtctgaagccgcatcccattgctgtggataactattttgtggatcgtgaacatacgccgctggatgaattcggagaaaagaattatgagtgtctggaagccattgacacgaagcagtttaatgaagatatgctgaatcttctttcgggaaaaatcgtggatcttcctacatttaatttcaggaccggatgcagggaataccggggagaccagcttcagcttggaaaagatgatatcctggtcatcgaaggcattcacgggcttaatgacaagctgagttatgcccttccaaaagagagtaagtttaagatctatatcagtgcgttgacacagctgaacattgatgagcataaccggatccccacaacggatggaaggctgatccgtcggattgtccgtgatgcacgtacacgtggaacttccgcaaaggataccattgcaaggtggccttctgtacggagaggcgaggagcagaatatttttccgttccaggaggaagcagatgtgatgtttaattcagctcttgtgtatgagcttgcctgcctgaaggtttatgcggaaccgctgctttttggaattgacaagagtgaaccggagtatcaggaggcgaagcggcttttgaagttcctggattattttgtgtcggtgcccagtgagggtgttccgtttaattcgcttctgagggagtttattggcggtagttgttttaatgtataaattaattgtatgaataaaaaaagctatgtgtagatataaggctctatgcagtgcagatatcggttggcgcaaagatgagaagattaggatttctctgtgcataggatctgtggtgtgtggagccttttgagtgtgaatcggaaaagttaaagtcttctgtggtgctgcggatggataacgggatttacagggtttaaaggaaagggaaaatgatcatgaaagaaaaagtacaactgacaaaactggctccaaactgtggctgtgcagctaaggtaggaccggggactctggcgggagttcttggagggctgccaaagttctgcgatccggatcttctggttggaacggacacttcggacgatgcggccgtttataaggtttccgaagatctggcactgatccagacactggatttttttactccggtggcagatgatccttatgatttcgggcagatcgcggcggcaaatgcattgagtgatgtatatgctatgggtggaactccaaagacggctttgaatattgtggcgtttccgaaggatatggatgtggaaatcctcggggaaatcctgcgtggtggtgcagataaggtgatggaggctggtgcggttcttgccggtggccatacgatccaggatgatacaccaaagtatgggctcagtgtgacgggttttgtagatccgaggaagttctggaagaattttggagcgcagaccggggataagctgatcctgacgaaggcgctgggtgcggggatcgtgaatacggcgatcaaggcggatctggtgacggaaggtgcacgtaaggcggttttggcttccatgaagaaactgaaccgggacgcctgtgaggtttttaaagagtttgaggttcatgcctgtacggatgtgacggggtttggccttgggggacatgctacggagatggctgtggccagtgaccggacggttgtgatcgatacggagaagctgccggtgcttccggatgtgaaggagtttgcttctatgggattgattccgggtggggcttacaggaatcgggagtttgctgagaaaaccggagtgaaaagtgtggcagagctctggcgggaggatctggtgtttgatccgcagacttctgggggattgctggcggcggttccggagagggatgtgcaggagatcatgaagcggctagatgcggctggtctgcaggctggggtgatcggtgaggttgtggatcggcgggagtggacgttggtgctccggtaggaaattaatttacgaacgaatgtttgaatgatgacgtcagagtggatggttgcgtagggggatactgctggggaaagtggtggtagcagaatgacggatggcggacgacggacgcctgggggagaggatatcggtccgggcagggactccgtcgggggatactactaggactccgtgagtcggctaaaagcattgcggcagggccagaactcgccgttggctcagacagctgtccctgccgcaataacgccgactcccgcagcccaagtagttatcacccctcctccgcagcagcccaaaccgatatcctctcccccaggctggtgcatccagctggcaggaaaaatataaaatgtgcggagagtatggttgtgggatgcagagaaggaaagttactgctcactggtaatattccgcgaggtgttttttgtgagcgaaggtcacagaaaacccgagccatactgcgcgaatttatgtgattagcataaattctgagcatcgcgaagcgtgttattgagaatggagtgaacagtaattcaggaaatataggctctgcatttttttaatatattgtttgcctgagggataaaagcatggtattatcatatgagcggaaattgagaagacataaagaatatgaaaaacaaatatgtgacgggaaaggaagaattatggagaaacataaacatgagagaagtacattttccgggaagatcggatttgtattgtctgcagctggtgcttcggtagggcttgggaatatatggagattcccttatctggcggcaaagtacggcggtggaatttttttactgatctatatcattctggcattgaccttcggatattctatgatcgtggcagagacagctctgggacgtatgacaaagaaaagtccggtaggtgcgtttggaacttttggtaaatcaaagtggctgtctttgggcggttggatcaatgcgatcataccggttctgatcgtgccgtattattccgtgatcggtggctgggtaattaaatacctggtggagtatgtaaagggaggcagtcagactcttgctgaagacggatatttttctgcttttatagcggatggattttctacagaaacctgtttcctgttttttacactgcttacgctagtgatcatttatgcaggtgtgcagaatggcgtggaacgagtttccaaattaatgatgccgatactggtattcttgtctgtggtcattgtcatttattcggtaacgaggccaggagcactgaaaggtgtgaaatattttctgataccaaatatcaaaaacttctcctggatgacagtggttgcggcaatgggacagatgttttattctctgtcgatcgcaatgggtattctggtaacttttggttcttatatgaaaaaggatgtatctattgaagggtctacacaaaatgtagaaatttttgacacagcgatcgcaatgatggcaggtctgatgatcattccggcagtgtttgcattttccggtggagatccggatacgttacaggcgggaccggcactgatgtttattacgattccgaaggtattcgcaagcatgggatttggaactctggttggaatcctgttttttgtactggttctctgtgcagctctgaccagttctattgcactgactgagagtgcagtatctacttttcaggatgaactgaaatggggacgcaagaaggcgacagtatttgtcggaattatcatggttgttctcggaagtctttcttctcttggctatggtcctctggcgtgtgttaagatcattggaatgcagttccttgatttctttgatttcctgacgaactctgtcatgatgccgatcgcagcgattgctacctgtcttctgatatccagagtagttggtacaaagaagattgaagaggaagtactgcaggaaggtggtactttccgcagaaaaagaatctttaattttatgatccagtatctttgcccaatctttgcggcgatcattcttttcagttctgtggcaaatgcatttggatggatttccatgtaaaagacataggagaccaagaaaattccaactttacaagtctatacacctgtgttaaaatagcaggtgcgcagccaggccaggtgatcgcggctggacagacgaaagggtccagacgaggaaagtccgggcttcacagggcaggatgccggataacgtccggtggaggtaactcccagaccagtgcaacagaaataaaccgccccgttttgcggggtaagggtggaaaggcagtgtaagagactaccgccgctgtggtaacagagcgggcacatgtaaactccattcgaagcaagaccgagaagaaagccatacggcggcccgtcgtgctttcaggtaggtcgctggagccttctggcaacggaaggcctagatagatgatcacccaacgacataacccggcttatcggtctgactgtgtatgataataagcacataataaaagcaactgtattttgcagatatgttctgtaaaatatcagttgcttttttgtaaaaaacttttctatgaaaacacagcgcccggttcccgcttcgatattcaggccttcgcaggagccggacgcgtccgtttgtcaataattctcgcaggaatccttgaatccctatttattccgtttacctctatatttctcctcacaatatttacaccggtaaacttcattctcttcatctgcaagaacaaaaatctgatccagcccctgctcgatggaagtaatgcagcgaggattcttgcatttgatcacgttcacaacctgcttcggcagcttcagctctttctttgcaacgatcttttcgtccttgatgatatttacggtaatattatgatcgataaaaccaaggatatccagatccagatcctcgatggggcattcaaccttgatgatatccttttttcccattttctggctgcgggcatttttgatgatagcaaccgtacagtccagcttatccagcttcaggtcatgatagatcgtcattgccttgccggctttgatatgatccagaacataaccctcacgaagagcacctacgtttaacatggcagttccacctccagtaatgtaagaatcagggccatacggacatacacaccatactggacctgtttgaaataagcggcacgtggatcagaatccacttcaacagaaatctcgttaacacgtgggagtgggtggaggacatacatatccttcggtgcaagctccattttctgtttgtccagaacatagaaatctttcatgcggacataatcctcttcgttgaagaaacgttccttctgaacacgggtcatgtacaggatatccagatccggaagtgcatcctccagacgttcctcctcgacaaactcgacattgttgcgtttcagaacatcctcacggatatagcttggaatacgaagctcctccggagagatcagaacaaatttcacattttcataacggaccagagcctcgatcagagagtgaacggtacggccgaatttcaggtcaccgcagaggccgatggtaatattgtcaagtctgcccttcagggagcggatagttaaaagatcggttaatgtctgggtaggatgctggtggccgccatcaccggcattgatcaccggaatattggatgacatagaagctacaagcggagcaccctctttcggatgacgcatagcacagatatctgcataacaggaaacaacgcgaatagtatcggcaacgctttcgcctttggatgcggagctagaatcagcagaagaaaaaccgagaacctttcctccaagattcatcatggctgcttcgaaacttaaacgtgtacgtgtacttggttcgtaaaacaatgtcgcaagccttttatcatcacaggtatgcgcatacttttttggatttttcccgatgtcgtcggcgagattcagaagcttatcaagctcttcaaccgagaaatccaatggactcattaaatgtctcatgttgtacctccaattatttactggaaataagattccttccagttatcatataatataactgtgagattttcaagagactttccgaggattttgtcgaagaagccattcgaaaaagagaccggtaaaaaaccacagaggagcatagtccagccggatcactcctttatactgaagcggaacatgagaataatcccagggacagatgtgaagcttctgaaaaaaagatccgcttaaaaattccacgaaaaaaatcccgcagctgtaaatgatcccccgtaccataaccggaaagcgggcaagcttgtagtaagccggacggatcagtgctgcaagtccgtaaacagggaacatcagaagagaggttttgcccatcatagtaaaatgtccggtgacaagagagtgcagtcctgtccataagatctccagacaccagcctgtaaaaccgcacagaaaaaaatccttcttttgcattttaaagctccttctcatcagcagaaatcctgcgctttccggaaaaatgtcagtttaactgaattaagaaagtcccctgcggggctgcgaatatccgcctggactttaaatatatttaacgtggaaaagcgtctttaatagccttccctgccttgaaaaaaatatacacgtgggttataatgaacaaaattattactgcaaagtgaaaaagcagtaatggatcatcaacacatgcggaaggagaaaacagacgatgaattatgaagaaagtcgtgcctacatcagagctgcggaattgaaaaagggaattgttctgggactggaaaatatgagagaactgatgaggcggcttggagatccccaggatgaactgaagtatgttcatgtagcgggaactaacggaaagggttctgtgatcgcatatctgtattccgctttatcaggtgcaggttaccgggtcggaagatatatttccccggcggtctattcctacagagagaggatggaggttaacggagaacctgtcagcagagagaaatttgcagcatatgtgacaaggatcgcggaggtgatcgatgagattgtaaaagagggaaaaccgcatccgtcagtatttgaaattgaaactgcagccgcatttctttattttcgggatgagaaatgcgatctggtattaatggaagttggtatgggcggtgatctggatgccaccaacattataagtactacagttctttccattctggtatccatcagtatggatcatacggcatttcttggaaataccctgggcgagatagcagaaaaaaaggccggcatcattaaaccgaacagtcatatggtaactgtaaagcagcagccggaggcagaggcggtcatacgaagaatatgcgcagaacagaatgtgccatacgaggcagcagaccaggacagcgcagaggtactggaagcatccataaccggccagacctttctttataaaggagaaaaatatacaatatccctggcaggtgcctatcagaaggaaaatgcggtggcagcgctccgagcactggaaatcctgaatgaacagggatatcccacaacactggtccagagacaggatggattgaaacgtaccacctggccgggaagatttgcacttctcgggacagaaccggattttgtggttgatggagcccataaccctgcagcggcagacatgctggctgcatccattgaacggtattttaagggaaaaaggatcatctacatcatgggaatgttccgtgacaaggattaccgcaaggtcatccggaaaacagaaaaatacgcagataccatcctgacgattgcggcaccggataaccccagggctctgaccccgcaggagctggcagatgcggtgcgggaatttcattctgatgtaaggccatttgacaacatcgaagccgcagtagcagaggcctatcagctggcaggaaaagaggatgtgatcattgcttttggttccctggcgttcctgggggatcttacagaaattatcaggaaacataacggaggaaaccaatgacggatttggaaagatacagagacgagatcgatgagatcgacagtgagatcgtacgtctctttgaaaaacgaatgaaggtgagtgaggaagtcgctgaatataaaataaaaaccggtaagcaggtactggatccggcacgtgagagccagaagatccatacgctgaaaaacaaggcccacggggactttaacagcctcggcgtgcaggagcttttccgtcagatcatggccatcagccgtaagagacagtaccagctgttgacagagcatgggatttacggagagcgcaatttcacaactgtgaagcatgttccccttgaaaacgcaacggttgtgttccagggtgtagagggagcctacagctatgcggctatgcggcagtactttgggaaaaatatcgaaagctaccatgtaaaaacatggaggacagctatggaggatgtaacccatggaaaggccgattatgcggtacttcctattgagaattctactgcaggtatcgtggctgatatctatgaccttcttatggagtacaagctgtatatcgtaggcgagcagatcatccgtgtggaccatgtgcttctgggcatgccggatgcacagataggggatatcagggaagtctgctctcatcctcaggggcttgcccagtgcaaggcatttctggaggaaaacccttcctggaaaaagaaggaagtggaaaacaccgcaggcgcggccaaaaaggtcagtgaggtgggggacaaaggcgtggcagctatcgcaagccgtgaggctggtgaggtattcggtctgaaggtccttgcagaaaatatctgcagagaaaaagcaaactctacacgttttattattgtaagcaggaaaccggaatacgaggaaaaggccgggaagatcagcatctgttttgagctgcctcatgaaagcggaactctttacaacatgctttcccatattatctacaacggactgaacatgaccaaaattgaatcccgtccgattccgggaaaatcctgggaataccgttttttcgtggatttcacagggaaacttggcgaaagcgctgtggagaatgcgttaagaggaatcgaggcggaggcgaatgttctccgtgttcttggaaattattaagagacagaggagctaaattattatgttggcaagaattcaggaatgtatcctttaccgtggattttcaaacggtgagatactggacgatatgacagaacttattaatctttatgaagcagatgaagaagcactcaaggcaagagaagaccagtttttcaaaagtgtcaacgggctggtggagctggcaggaatgtacggtttttccggaaatatctggcatacatatcttaccttccttctggtaaatcatgagaacgctttcagtatggcaagcgagatacgaggagcgatcaagggcagcattaacgacctggcaaaaaatgatttccagattttcaaggaattgtatgattttgacatcacggtctttgataaagtgttcggaactgtatgctgcagggtgatctgtgattaccagacaccggatgagaacagcaagctctttaataccaggatccgtgaccgtatctgtcagatgagcaaaaccctggcagcagccaccacaaccgaagaatttatggatgatatggtatccttctataaagatttcggtgttggcaagcttggtctccataaggcattccgtatcggccacgatgaggagggaaaggtggagatccagcctatcacaaggatcgcacatgtgaagatcgatgatctggtaggatatgagatcgccaagaaaaagctcattgataatacagaggcatttgtacaggggagaaaggcgaacaactgtctgctctttggtgatgcgggaaccggtaaatcttccagtatcaagggaatcctgaaccagtattatgatcagggacttcgtatcattgaggcctataagcatcagttccaggatcttaatgaagtcatcgcccagatcaaaaaccgtaactatcgttttatcatttatatggatgatctttcctttgaggaatttgagattgaatataaatacctgaaagcagtgatcgagggcggtcttgagaaaaaaccggacaatgtcctgatctatgccacaagtaaccggcgtaatcttgtccgtgagcgtgccacagacaagctggagatcgcagatgacaatgatctgcattcctccgacaccgtgcaggagaagctttccctggtatatcgctttggtgtccgtatctactttggcaaaccggacaaaaaacagttccaggagatcgtccgtacactggcagcccgttatggagttaccatgccggaggaggaactgcttctgaaagccaaccagtgggagatctctcacggcggactgaccggacgtgcagcgcagcagtttattgattacattgtgggaacagaggaagaaaaaaagaaatagtttacctgtgtattgggggaaaggatgaaaaactatggcggtgacaacctttgcagcaattgatataggctcctatgaagtcagtatgaagatctttgaaatgtcaaagcggatcggcttccgggagatcaatgatgtccgttaccagctggagctgggtcgtggaacttatgctgcaggacggctagagatggagactgtagatgagctctgcgagatccttaatgattttaaacgcatgatggctgaatttggggtagaaagctggcgtgcgtgtgcaacaagctctctccgtgagctggaaaatccggtgatcatcctggagcagatctatcagagaactggtatccgggtagagatcctgagtaatgcggaacagcattttctgggatataaatccattgctgccattgaatccggcttcaaaaaggctattcagaaggggacggcgatcctggatatcggaggaggaaatctgcagatctctctctttgataaagatgctctggtgctgacccagagtatccgtatgggaagtcttcgtatccgcgaacgtctgaaagaactggagaaaacaactccacattatgaccggctgatagaggaatttatccgaaatgatctgataagctttcaacgtctttatcttaaggacaaggaaatctccaatctgatcctgatgggagattttctcacagatacgatctttcaggacagatccggagagaatatcatcacaaaggaggaattcctgaagaaatacgagaccattgtaaacatgtccgatcatgaccttgccgaatccatggagttggaaccggaatatgcgtctctgatcgtgccgaacatggttatcatccgaaattttatagaaatctttcaggcagaagcactctggatcccgggtgtttctcttctggacgggattgcctatgactatgcggaaaaaaacaaatatctgaaaagtgtacacaattttgaaaatgatatcctggtggcatccaggaacattgccaaaaggtattccagcggaaagaaccacattgcaggaactaccgatgtggcactggatatttttgacagcacaaggaagatccacggcatgggaaaacgtgaacggcttcttttgcagattgcagttcttcttcatgactgcggaaaatatatcagtatgagtgaggtggcagaatgctcttaccggatcatcatggctacggagatcataggtctttccacagaggagcggcaggtgatcgctagtgcggtgaggtacaataccagagaattcggctgctacaaagagatcaaccgtgaaacatccatgagcagggaaaattatctcctaactgcgaagctgaccgcgattctccgcctggccaatgctatggacagaagccattaccagaaggtaaaagcgcttaatgtaaccttaaaagacaggattctttacctggtggtggattccgcaagggatgtttctctggagctggggcttctgaaagataaaaaggaattttttgaagaggtgtttggaatccggcttgtaatgagacggaagggaagaagataacggaggaggtttttgtatgaaatttaaggaatttgacaaaccggaatattttgtaaacagagagctgagctggatcaaatttgatgatcgtgtgctcagtgaagccagagacaaaaatctacctctgtttgagagactgaaatttttgagtatcacctcatccaatctggatgaattttatatggtccgtgttgcatccctgaaggatcaggttcatgcagggtacaaaaaaacagatattgcaggaatgacagccaaggaacagctgaaagccatcagccggcagacacatgatcttgttcacgtacagtacagtacattaaaccggtctctggtccctgcacttgaaaaagcaggacttcatgtgatctttgagcacgaggcattttccgagaagcagaaagaatttgtggatcagtattttgaagataatgtatatccggtcctgacaccaatggcaatggattcttccagaccgtttcctctgatccgtaataaaacgttgaatatcggagcgcttctttccaaaaaagataccaaaaaaggaaaagaagagattgattttgccactgtacaggtgccttctgtacttccgagagtagtggtcattccatctgagaaaaaagaccatacaaccgtaacacttctggaacagatcattgagcgcaacatcgacaagctgttcttaagctatgatgtgatctgtgcccatccgtacaggatcatgcgtaatgcggatcttcctattgacgaggatgaggcagaggatcttctggttgagatccagaaacagctgaaaaaacgccagtggggagaggtgatccgcctggaagtggaagataagatggatccgcggcttctggatattctgaaaatggagtttcaggttcatggagatgatatcttttttatcaacggaccgctggatctgaccatgctgatgaaggtttatggtattgacggatacgatcagttcaaggaaccgaaatacaaaccggcagcagtgcctgcatttcagaatgataaagatatttttcaggtgatcagggagggtgatgtgttcctgcatcatccgtatatgagctttgatccggtggtgaatttcgtgcgtcaggcggcaaaggacccggatgtactggcaatcaagcagaccctgtatcgcgtcagcggcaattcacccatcatcgcggcacttgctcaagccgcagaaaacggcaagcaggtttctgttcttgtagagctgaaagcgcgttttgatgaggaaaacaatatcgtctgggcaaaaatgctggaaaaggcaggctgtcatgtaatctatggtctggtgggcctgaaaacacacagtaagatcactcttgttgtgagaagagaagaaaacgggatccgcagatatgtgcatctggcaaccggaaactataacgattccacagccaagctttatacagactgtggtatatttacctgtgacgaacggtttggagaggatgcaactgctgtgttcaacatgctttccggatattccgagccgaagcgctggaatcgcctgatcgttgcaccgatctggatgaaggaccgttttgtaaaaatgatcgaaagagaagcggagcatgcgaaaaagggagaagaggctcacattgcggcaaagatgaattctctgtgtgaccctgagatcattgcagcgctgtattatgcttcttcctgtggtgtcaggatcgatcttctgatccgcggcatctgctgcctgaaggtgggcattccgggtatcagcgaaaatatccacgtgcgttcgatcgtcggtaatttcctggagcacagccgtattttctatttccgcaatggcggttccgatgaaatctatatgggaagtgcggactggatgccacgtaaccttgaccgtcgtgtggagattgtttttcctgtggaagatgagcggatcaaggaagagatcatgcatgtgttggatctggaattccgtgacaatgtaaaagcacatatcctgcagccctccggtttgtatgagaagcaggacaaacgtggcaaaacgctgataaattcccagatggaattttgcagggaggctaccgagcgggcaaaggcagcaaaaaaggagaaaaaagaaaagaagagagttttcgtaccggctgaaccggcggaggatattataaaatagtaaaagaaaaggacagcctgtcatatcaatttatgatacagctgtccttaaataatgttctcaaagattatccatattacgtcaatactgcatgatattcagaaaacctgacagcatgcgggcgtttctaataacacttcttgcaggctttataccctgcagcttcagcctgggagcgtgtcatctctgtggcattatccggattcatatttccacagttagggatccggtggtacttgcttccggtagcggagatccagaccatatcacccactggctccggatcggcctgcactccggtctgaggatctgcagcagccgaatcagaagatccatagccggacgcaccggaatccttataaacggaggaaggctgtgtgccggtatccgattcatctccagcagaataatcattacagggactctggttccactggatattgtttccgtcgctgactgcgatcaccgtaccctgctcatcagtacgaaatacctgtattcccatatccgcaagcttatccatggtatccttatgaggatgtccgtaggaattgccggcgccgcagctgatcactgcatattccggaacagtcttctgaagcagatcccaggtggtggcagtggcagaaccgtgatgtcccggaacgatcacatcgcaggaaagatcaagtcccagatcacagatcgcttcctccccggcagattctgcatccccagtaaaaagaaaatggttatttccgttttccagccggatcgcaacagaattgtcgttatcgttgctgctgatcgattgaggagaaagcaccgtaaattttccgcctccgaaagtaaaatccgttccgggctccggatgctgcacagttaatccctgagcggcaacactgttttcaaaagattgatagatctttgtatcctgtacataatctgcaccgatcacattttttacggaaaagctgtccaggcatcctacaagaccagccacatggtcctcgtcataatgggaggagatcatatagtcaatgatggaaatattctgtttctgcagataggaaaccacgaaactggaatgtcctcggtcaccgccgtcatacaggagattctgcccctgtgactggaccaggatcgaaagcccctgccctacatccagaaagtgtacagccattgttgtgtcagcagaagcagcctcggctgtgtaagcagcagagggaactcctgcgactgttagcagaacaagcagcagagaaagaaaaaatgtctgcagctttctgcgaaaagaatgtttgtgatgcatgagaagtcaccccttatcttaagtattttcaggggaaattataaaacagaagagaaagaaatgcaaaataatatatgtgaaaatacagaaaacagataaacaggaagaacgaaatttttatatgcaatgttcagagcaaagtttgaaagcaataacaggaaaaagtgaagtagaacaatcacaaaaaagcagtcagaataaaaatcctaactgctttcagttgatagccagtacgggaatcgaacccgtgtttccgccgtgagagggcggcgtcttaaccccttgaccaactggccatattcatttgtgtcgtttgctcttgatttctgttgtttcccgcaaccgacttcgttagtatataatacttttttacaaaatgcaagcactttttttctttttttgaaaaaaattttcaccctgttttttgataatttttttgacggaaaaatctattgatgatatgatagatacaaaatgaaatggaataaaaaaatataaagaggaagagtatggattacagaaaaaagaaaagtttgatatggaagggagaatcctttctttttgttgtggtactgctggtttttggcgcgatctttgcggcgatccacacaggggggctgatccagaagcaggacagtgtacagcttcttaacaaaggatggtactacataaaagacggaaaaaaacaggagatcaccctgcctgcggaaattccggcaaaaacaggtgaaaagctgatcctgtacaatgaaagtctgggagcggaaagcagagggatgaccgtggtttctacaggagcccagtacgatctggtgatacgcctgaatggaaagatcctgtatgaatataaggaggccatgttttccaaaaatgtgcagatgcgttccaaggtgcagtgcatcgccgctctgggtaatgacacagagggaaaagtcctgacgttcagctattctgcgcctcagagaggaaaatatgttatagagccggtatgcataggaaccggaagtgcaatagcctggtatcagatcagaaaagcagccattcctttaggggcggcaacgatcatgatcgtattaagtatgatcgccctgtgcatctgcatctatatgagaataaggcagatgccggacagacggttccgggatgtggcactgttccttatgatgtgcagtatctggctggtgacggactcatcactggcacaaagctacagcagatgccccgaagtattatgtctcatttctttttatatgttcatgctgctggcagttccgatgctgcgttttttgcagaatatcggaaacatgaaaaaatacaggctcctggatcttggaatctttacattttatctgaatgctgttttacagggagttctggtgatcctgggagcctttgaatttaaggatatgttgtttgtaacacatatcctgctggttgtgtgggtcctgatatcagcggtacttctgatccgggagtaccggaagcataaacagcgtgagatacatctgcttctcattgcatatatcatcgtgggagcaagcggtatcatagcgctgatcctgtactggctgttcgagatttcctactatggatccatttttgaattgggaaatcttgtgtttcttgtgctggtcattgcagacgcagtcatgatgatggcagacaacgtccgttaccgtctggaatcccaggcttacgaacgactgtccagagaggatgggatgacaggacttgagacgagagccaattttgagaaaaaactggaaagtatttccgcagatatgggcagataccgggatatccttcttatgtatatcgatatcgatcagcttcgcgtgatcaacgaagaatacggacgggctgcaggagacgagatggtggtgatctcggccagatgtgtggagaacgttttccgggaaaaaggaacctgctaccgcatcggcggggatgaatttgcggttctggtctatgatccggaagtaccggacgaattctggtcggaacgcctgaaagaagaactccggaatatcgggagaggatgcagacatcgtttttcgttgtccctgggatgcagccatctgcgaaataaggatggctctctgaaatccatgggagaatggaaatatgaggcagacaggaagctttatgagaacaaaaagaagggggatttgaaaaatggagtatattaactgttttcagatcacatcccttgttttggtgacgatgatcgcgatacattatttttctcataaaagactgaacaatgcggaaaacaggaattttgtatgttttctggctttcagcggcgtttacgtgctgctggatatgctgagtgcggtgatcgcgggaggcggcagcagcgaaggctgcagaatgtcagcgctggtcctgacgctctattatttctgtgatgtcatacttacctacgggcttttctgctacattcggatcatcaccggaagacagaaggagaaatataaatggctgaaaaccggttgggtggtcctgccagctgcaatgctgctggcagttacagcaaacttacggacgggatggcttttttattttgaccaggaaggtagatttatccggggaagttttcattttctgctctatggatatgtattcttttttatgctggtgatcgttgcatttatgttactttatggaaaaacagcagaaaaagaaatacggcgcaccatatggagattttggtttatcgaagcagcctgcctgtttctccagattgccgcggaaagaatactgcttaccggcttcggactttctgtaggactttggctgatctatcttactatgaacaatccaggtgaatatacggacagtatgacaggtttatttgacaaacagtattttgacaaatggatcggagaaaagctctatcgaaaagaaagctttcatctgcttgctgtggatgcccgcaatatgaagcagatcaaccggatctacggtaccagagtgggagatcagctgctgatccgggcggcgaagggatttcgggagatcacggattcagtgcagatctttcgtatcacaggcaattgctttctggcagtgctggactcgctgacagattatgaaaaagccagagatggcatagaagaatttctgaaaaagccgttttttatcgaaaacgaaaaggtgtcgttccatgctgcaatctgcgggatcatgaatgcggaaaaactggaaaaagaggatagtattctttcttatattgaatatatgatctctctgatacagaaccgtcaggatacggtcctgattcagtcggacagcaagatcctggagggctttcgctatgaacaggaagtggagcattttcttcagaaggctgtgaaagaggatctgtttgaagtatattatcagccggtatattctataaaaaaccaggattttattactctggaggcactgagccggctgaaacatcctgctctgggaatgatcccgccggatgtgtttatcgggatcgcggaaaaacagggaatgatctctgcagtgggatgtcttcagcttcacaaggtctgccgttttataaaagaacatgaatatatcatgaagaagatccggaatgtgaaattcaatctttctccttccgaactgatgaaacccggatacagccatgtgcttatcgggatcatacaggggtatggattagatccgggatattttcagtttgagatcacggaaaacgtggcaaccgaatacagcgaaagcttctgcacagccattgatgattttgcagaagtggggatccacatgtgcctggatgatttcggttccggttatgcaaatctgaacgcagttcttcgcatcccgttttcagcagtaaaaatggaccgttctcttttgtccggggtcagcagcgatcctcagacggctaccttttatcgcagcattgtcatgatcctgcagcatatgggatataaggtgatcgcagaaggcgctgagaccgaaaaggaggtaaagcttctggaaaaatggggtgtggatatgatacagggatattatttttccaggcccctgtgcgaggagaagcttctggaaaaaatttcctgaaatgatcagaaacaggcggaaaacatgctttcataaaaagcagggttttccgcctgttgtattcagacagacacaaattgcttgaagtttacagatacttttgatagaatagataggctgtggcggctgaagaaagcgatttttcggaagaccggttccttgaactgccacgcgtatcttttggaaaaattgcagagaaaagatgatcatgtggactttacaagtacatatattttgagtataatacaaacaaatgttcgaatataaaaaagaaaggaatcagtggaatggcaaaaaaagacacttatgatgcgggcagtatctctgtcctggagggcctcgaggccgtgcgaaagcgccccggtatgtatatcggaagcgtatccagaaagggactgaaccatctgatatatgagatcgtagacaatgcggtggatgagcaccttgcagggtactgcagccgtatccatgtagttcttgagaaggacggttcctgtacagtagaggataatggacgagggatcccggtggatatgcatgccaagggaatatctgcggagcgtcttgtttttacaacccttcatgcaggcggtaagtttgacaattccgcatataagacaagcggcggacttcatggtgtaggttcttccgtagtgaacgcattatctacgtatctggatattaagatcagccgtgatggctatatacatcatgaccactatgagagaggaatccctaccattgaactggaagcaggacttctccccaaattagggaagaccagaggtaccggaacctgtgtgaatttccttccggatccggagatttttgagaaaacaagatttggagcagcggatgtaaagagccgtcttcatgagactgcctatctgaatccggagcttaccatccattttgaggatcgaagaggggacactcctgaggatatcgagtatcatgagccggaggggatcgtaggctttatccgtgaccttaacaagaatgcacagcctctccatgatccggtttattttaaaggagaggcagacgggatccaggtggaggttgcttttcagtttaccaatgagttccgtgagaacgttctcggattctgcaataatatctacaatgcagagggaggaactcatctgaccggatttaagactacattcacaacggtaatgaacacctacgcacgtgagatcggtgtactgaaggataaagaccccaattttacaggtgcagatatccgaaacggaatgactgctgtagtctccatcaaacatccggcaccccgctttgagggacagaccaagaccaagctggataaccaggacgcatccagagccaccggcaaggtagcaggagaacagctggtactgttttttgaccgaaatctggaaacactgaagatcgtcctttcctgtgcggaaaaggcggccaagatccgtaagaccgaggagcgtgccaagacaaaccttctcaccaaacagaaatactcttttgattccaacggcaagctggccaactgtgagaaaaaggatccgtcactgtgtgagatctttatcgtagagggagattccgccggcggttcggccaagacagccagagatcgtaactatcaggcgatccttccaatccgcggtaagatcctcaacgtagagaaggctaccatcgacaaggtgctggccaacgcagagatcaagactatgatcaatgcctttggctgcggcttttccgaaggctacggaaatgattttgatatcacgaagcttcgttatgacaagatcgtgatcatggccgatgcggatgtggatggtgctcatatctctactctgcttctgaccttgttttaccgttttatgccggagcttatctatgagggacatgtgtatattgccatgccacctctttataaggtaatgccgaagaaggggcaggaggaatatctctacgatgacaaggctcttgagaaataccgtaagagccataaaccgggaagcttcacgctccagagatacaaaggtctcggtgagatggacgcccagcagctctgggagactaccctgaaccctgagacaagaatgatgaagcgtgtggagatcgaagatgcccgcatggcctccgatgtgacagagatcctgatgggaagcgatgttccgccacgtaaggcctttatctatgagcatgcaacagatgcagagctggatatttgattgggagaataaactatgaatacgaaacaggacaatatcatccgcaccgattatgcggagatcatgcagaaatcatatatcgattacgccatgagcgttatcatttccagagcactgccggatgtacgtgacggactgaagccggtacagcgccgtaccctttacgatatgtatgagcttggcatccgttacgaccgcccgtaccgtaaatgtgcccgtatcgtaggagatactatgggtaaatatcatccccacggtgacagctccatttatgatgcgcttgtagtcatggcgcaggaatttaaaaagggtcgtacactggtggacggacatggaaactttggttccattgaaggcgacggagccgcagccatgcgatacacagaggcccgcctggagaagctgacccaggaggtttttctggaagaccttgataagaacgttgtggacttcatgccgaactttgatgaaacagagaaggagccggtagtacttccggtgcgtatcccaaatctccttgtaaacggagcagacggaatcgccgttggtatggctaccagtatcccgccgcataacctgggcgaagtggtggatgctgtgaaggcatacatgaagaataatgatatcagcacccgtgggctgatgcgttatctcaagggcccggattttccgacaggtggtatcgtagtaaataaggacgaccttgtaaagatctatgaatctggaacaggtaagctccgtatccgtggacgggtggaaatagagaagctgaagggcggtcgccagcagctggtgatcacagagattccttacaccatgatcggtgcaaacatcggaaaattccttaatgatatcgcaaccctggtagagaccaagaagaccacagatatcgtggatatttccaaccagtcctccaaagaggggatccgtatcgttctggaactgaagcgcgatgcagacgtggagaaccttaccaacatgctctataagaagacccgactggaggataccttcggtgtcaacatgctggcagttgcagacggaagaccggaaacactgggactgaagcagatcattgctcaccatgtggactttgtatttgaagtaaattccagaaaatatacaacccttcttgccaaggaacaggagaaacgggagatccaggaaggccttatcaaagcctgcgatgtcattgatctgatcatcgagatcctccgtggcagcaagagccgtgaccaggtaaagaaatgcctgaccgatggtatcacagaagggattaaattcaagaccaagacctccgaaaaagcggcaaaaaccctgaaattcacagaaaaacaggccgcagctattctggacatgcgtctttacaagctgatcggtctggagatcgatgctctgatgaaggagcatgaggaaaccatgaagaacattgctgcttatgaggatatcctgaataattatgactccatggcagcagtgatcatgggtgaactggatcagatcaagaaggaatacggcagtaagcgtaagacttccattgaaaacgccgaggaagctgtttatgaggagaagaagatggaagagaccgaagtctgcttcctgatggatcgtttcggatatatgcgtctcattgacaagaatgcctacgagcgtaataaggatgccgctcatgcagagagccgctatgtctttacctgcatgaatacggacaagatctgtatctttacagataccggcaagctccacaccgtgaaggcagaggatatcccgctggtgcgtttccgtgataaaggtgttccggcagataatctgggtaattatgatagtacttccgagcagatcctttatgtggcaccgctgagccaggtggcagcctccacagtgctctttgttacagagaacggcatgtgcaagctggtaaaaggagaagagttccgtgcttccaagcgtaccattgtttccaccaagcttgcagaggatgaccgccttgtattcgtaggagcagcggacgagatggatcaggttgtgttccagtctgaaaagggttactttctccgtatcatgaaaaccgagatctccgtcactaagaaaaacgctatgggtgtccgcggcatgaagcttaccggcgaagaccggatccaccatgcgtatcttttggaaagcaggcaggagtatgccattacctaccacgacaaaccatatgtacttaacaaagtcaaactcgccaagcgagacaccaaaggtgtgaagccgagaatctgatcaccaccccgccatctacctcacagcttacggtgatctggctggaactgaccattcgtgagatgcacgctcattcccggtttgacgggcagatatgaggggaaggctctcctccctgaaatacgtagacaaaggtcagctctacgaagccaccatcctcaagtccctgaaagaagacaccacccgccgcactgtagtcctggtatcccacagagtctccactatgaatgtggtgtatgagatggagaatgggagattatcataagagatggcgctttggatacattgatatagatgaactaaagcagtataatatataacttgtagtgagggtacggtgttgtaaatggaagagaagaagatgaattatattgcacattgtgatggtgaacgtgaacaaagtatattagagcatttgcagggaacggcagaaaaagcaaaagattttgcagaagtttttgaaaaaggagattggggatattgctgtggaatgctgcatgatatcggaaaatatagcgataaatttcaacgtcggattcgtggagaagaaataaaagtggatcatgcaacagcaggagcaagagtttgcatggaattgggtgggatgtatccgtttttggagatgtgtattgcgggacatcatgctggcttatccgattatggcgtcagcacagatacaggaaattcatctactacacttggaagaagaaagaagaaaatagaagatttttatgcatacaaaaaagaagtgaagattccagagttaaaaacatcaccagttaatgtagagaaaacgaaggatttaaatttttctttaagtatgtttacgagaatgatgtattcttgtcttgtcgatgccgattttcttgatacagaagaatttatgacagaagaaagatcgggacgacagcaggggcaagagatacaggtgcttctggataaattggaaaaatatataacagagtggctgaaaaatacagaaacagaaagtgtaaatggcagaagaacagagattttaaaagcttgcctggaaaacggagagagagaaaaaggcctttttcggctgacggttccgactggtggaggtaaaacggttgcatcgcttgcatttgcattaaggcatgcagttaagcatcacatgaaacgtattatttatgtgataccttataccagtattatcgaacaaaatgcagcagtttttcgaaggatattaggagatgaaaatgttctggaaaatcattgcaacatagattatgaggaagcagaagaactgaaacctatgcagcttgcttctgaaaactgggataaaccagtagtagttacaacgaatgtacaattttttgaatccttgttttcaaataaatcttcaaaatgcagaaaattacataatatggcaaatagtgtgatcatatttgatgaagcacagatgttgccaaatgactatttgaaaccctgtctgacagcaattgaagaactggtgataaattataaggtgagtgcagtattatgtacagctacacaaccggcattggatgcttttttttgcaatataaagcagattactgagctttgtccaaggacagaggaacagtttgagttttttaaaagagttcactttgaaaacgatggaaaattgtcagaagaagacgtggaagaatgtctgttaagagaaacacaggcattatgcattgtgaatacaaaaaagaaagctcaaaaaatttataatgctatgagagaagatggcgtttatcatttatctgaatattcttgtgcgatgaaatcgcacttccggaaatttgggaatcagatgtccggaagtggaaatcacctatgtaattatgcgagtttactcgcgcagttctttatccaaaccatatacctcacgcattgatctatcatgttcagcatcaatgcttgtgatatttattcgatagctgtcgtgggcaatacggtcaatgattgcatctgccagaggactgtcaccaccgccgagctgctcataccattcctcgaatgcatactgggaacagaaaatcgttgaagatttcttacgtctcctatgaagcagttcgaagatgtccctttgttctgaattcgttggtttcaatagaagccactcatccaggatcagaacaactggattggcatacttcgccatgacttttttgtagttaccatctgtccgtgctgtctccagatcaataagcagatcagggagtcggacatacttggtattgaaatactgcttacaagcctccatgccaaaggcacaggccatgtatgttttaccacagcctgtagcgccgatgataaaaagatttcggtgttcagatatatattcgcaagttgcaagccggttaatgagatccttgttaagcttgcgtccggaagtgtagttgatatccatgatacttgcttccggctgatcgaatccggcattgcggataagacgcttctggcggttattcttgcggttgctgtattcgatatcgaccagcattccaaagcggtcttcaaaaggaacttccttgaatttaggatcgtcaagctggttacggaatgcatctgccattgttgtaagacgcatttcaataagtttatctattgtactctgatttgtcatgtgtgattacctccgatagtagtcggcacctcttgtgatgccgtgtgctttatgtgtggtcttggattcagtagtttctgattccagttttacagaaccagttacaaggatgtttttaatactcttgtagctgggcgaagatgtataggataacgcctttttacaggctgcttcaagcaatgcatcggagtatttctcagcaagcttcagaagccccatacaacttcggtaagtctgttgttccacacgtttggaggtcagtattgcattgaccacagtgtacgtatttatgccaatccgctcagcccatttgcggaaccggtcgccgttccattccagatatttctggtggtcttccggcatatgttccatgaccgtgctgtactgcccagggcgtcccttcagacgacggtgggaagcaatgcggttatggttgtagaaaatttcaatagtggtatctgttacctttacatccactttctttttgatgtattcataaggaactgagtatagcattccatccacagatatgtgataattgaactggacggtggctgtcttccagtcgctcagttcaaaacgggtagaaggtaatggtgccagcaatggtttttcttcctcaagaaataaacttcgccgactaccctctttcttttgaaagagcctttggttgaacagttcaagcttgtctctgattgcacgatttaattcggcaagggagaagaactgttcatcccgaagtgctgctgtaatccaggtagagatatttcctaccgtcccttcagcattcggcttatccttgggagccctgacacgcgccggaataatagcagtgccataatgctcagccagttcctgataggtctcattgatctgctggtctttccatccgccattatgaacaactgcagttttgcagttatccggtacgaggattctggcgacaccaccaaaatattcgtacatatggacatgtgcattgatccatgatttctgtttcatgtccagaaatgcttccacgtatacatactggctgtaagtcattacaccgacaaatatgtatgctttgatgatttcgccggtatcaggatcaatgactgttgcaggatcacctgcccagtcaacttcaacctgctcaccgggtttacggttgatatgcatggtagcacgatgcttctgctcatcctgttggatgtgatagcagaactgtgaatacatgagtggttcttcaccattggcacggcaatcctccatgtattccgtccataggagttttttgcttacgccgttgcgaagcagttccttacggatgtaatcataatccggcatccgcttgttggcagataccttgctctctttagagaacatgagcctttgaagctctgtgtcggtcattgattcatcaagaggccaagagatatttagttctctggcacgtttttgaactttgacgacagttttttgtgaaacaccacagcttgccatgatgttgcgttgtgagaatcccaatccagtaagccggatgatttctcgatatttggtcataatcgtgacctcctcataatgaatttacactataaagtgcataacatcattataaggttttaggaaaaatgcgattccctttttgccggaatcgtgattccgtaaaaaacggaatattgatttccatacgccggacaggtgatggatttcaccccggattattcatttatctacgagcatgtatccaaaacatagaaagcgtatgttaaagcagataaaagaacgattgagagaagggaaaaagtgcattgtaatttcaacaagtctggtagaggcaggagtagatcttgatttttatacagtatacagacagctttcaggaatagattctatcattcaggcggcaggaaggtgtaatcgtgagggaaaacggacgatagaagaaagcaaagtggtgatttttcagtttgatgatgctgaaaaagttccagggcagagacagcagatggatgtttcgaaagcgctgcttgcgaatgaatgtaaaattgaagatatgcagactgtaacaagatactttgaaatgctttatcatatgcgaggtgaaagtttggataaaaagaaaatctgcgaagagtttaatgggggatggcatcattttgctacagtggaaagagagtttaaactgatagatgaaaacacggtaaccgtttttgtaaatcaggaagaagatgctcaggaagtgatacaggatctgaaaaataaaggttttacaaaatccggaatgagacgggctgtacaatattgtgtgaatttgtataaacaggaatttgagaaatataatgatgcggggatgctgaagctggtttcggaagatataaaggatttctatgaactgacagatttagaacaatattcagaggagacaggactgaatcttgaggttgactgtggcatggcagtttggttgtgaaaatatgtagattagagcagggagattaaggtggaaaaaccttaatctccctgttctaattctacacggttacatttaaaattattatttcaatccacaggaaccattttaatcgaatcaagcaagtcgcctgccttcataggcattaaaatgttttctgacatactataaatataatatataaataaaaagaattcaataaatttaaatgtaaataatttaggggcaagtattgtatattttggatgagtgtagtatatttaagatggcgagaaaaaataaaagaaaattattaaaaataaaaagaatttacagaaaaaaggagctgcatatgattctatatcatgggagcaaagaggtagtggaatatccggaaatcagaaaagccagatttaacaaagatttttattttggtttttattgtacaaatattgaaaagcaggcagaacgatgggctataagatatggtaaaaaaggatatattaacaagtatgagtatacagaaaatcagagattaaatattcttaaattcgataaaatgacggaagaatggctggattttattatttcctgtcgaaagggacaggcacatcagtatgatattgtggaaggaccaatggcagatgatacaatctacaattatctgcaaaattatctggatggaaagatttcaagagctgctttctgggaattggtaaaattcaagtatccaacgcatcaaatcagttttcatacaatttcagcactggatacattgaaatttgtaggaagtgaggttgtttatggcgagaaaaaataataatgctttgttttttacctgtagtttgatcgagtacataggacgaactcaaaaacaacgtcggtggaaagttacggattatcttggaatggaaaatataaagcgaatatataactatgcggatgtctttcactgtgagccaatagaaaaagttgcggcagaatttacagagcaatgtgatattccggagggcgaatttgacaatgtatcaatatgcaggtatgcaattccggattactgggatattggagaagtatatgagagattaatagaagacatatacgatgatacagaacttgaaaagggaatatgggaaatttatcattcctggattgatgcacatatttcggactataatacagatttttattatcaatcacgagattatatagcagcatgttataaagctggtgaaataatatgagaaaagagggaaagtgcctatgggaatgggagtaaaggtcagagtgtggggggattatgcattattttcaagaccagagatgaaagtagaacggtgttcttatgatgtaataacaccgtcggctgccagaggaattttggaagcaatttactggcatccgggcatgaaatggtgtatagataagatttatgtgaagaaaccggttaaatttaccagtgtaagaagaaatgaagtgaagagtaaggtatctgcaagtaaagtgcttgaagcctataatggaggaatgaaacccctatatttaagcagtaaagaggaaattgtacagagagcgtctttgttgttaagtgatgtagagtatgttattgaagctcattttgaaatgacggagaaagcaaatgaaacggataatccagggaaattcaaggatattattatgaggagattgaaaagaggcgcatgttacagtatgccttattttgggtgtcgggaatttcctgcaaattttgagttgtgtaatgaagaggaaattcatactgcatatgacgatgtagaggaaaaagattttggatttatgctatatgatattgattattcggatgaagagaatcttagccccatgttttttagagcaatcatgaaacagggagtaatagatgtgcgaaactgcgaggtggttcgatgatactgcaggcattggtgaaatattatgaagatttggaaagacaagaaaaattacccaaacaggggtggtgtcaggcaaaagtttcttatggaatcaatttgtctacagacggggatataaagaatatcttatggctgaaggaggagagacaggcagggaagaaacagatttggatttcacaaacaatgaaagttccggcaatgctcacgcgatcatccggagttgcggcgaattttttatgtgataattcgaaatatatgcttggaattgataagagtggtacaggaaaaagaattacagaatgctttgaagcggcaaaggagaagcatctgaagttgttgaaaaatacttccggagaaatggcacaggctatatgtgcttttttttataaatggaatccggaaaaagcaaaagaaaatgctgctgttttagaaaactgggaggagatcacggatggtggaaatcttatattctgtatggataaaaaatatgcccaggatgacaaggaaatagagcaaatatggaatgtagaaagtaaacagtcggaaacagatataagtggaatttgtctggtaacaggagaaaaaactgaaatttcaagaattcacaggaatataaaaggggtgccgggagcacagtccagtggtgcagctttggtttcttttaatgcaccatcatttgaatcttatggaaaagaacagagctataatgcaccggtcggaaaatatgcagagtttgcttacacaagtgcgttgaattatttgctggcacaaaagaaatatacgtttccgctgggagattctattattgtatattgggcagaggaggcaaagacggaatatcaggatgcgcttttagcattgttaaatccggtaaaagataatcaaagtgaggtacatggattttttgaaaaactcagaaaagatgaacagatcataattgatgacattgaattaaatccatctcagaagttttatattttatgtctggcaccaaatgctgccaggttatctgtaagatttttttatcagagttcatttggaaatattacgaaaaatctggcatgtcattatgaacgaatgcagatgataaaacctaaatgggaagagcgggaatatcttggaattgaagatatgttaaaagaaacagtgaatatgaattcacgggataaaaaaacaatctccaatatggccgctatggcgttttcagctattttacaaaattccaggtatccggcaagtttgtatacagatacattaataagaatacgggctgagcagggatgtgtaacatggggaagagtttctattgttaaggcatttctgataaaaaattataaaaatacggaaggagagatctgtatgggattaaatgaagaatctaatgatgtagcatatgtattgggaagattattttctgtgttggagtcgattcagacagaggcaaatcctggaataaaatcaacaattcgagatcggtattttaattcagcatgtgcaacaccggcatcagtatttccagtattgtttaaattaaagaatagtcatataaaaaaaatagaaagagataaagggtatttgaaaagaaaatatgaagatcttttgggcgaattggtgagtaagctagaagcttatccaaaacgtttgccattggaggaacaaggaaaatttattttggggtattaccaccagaaacaggaaagtatttgggaaaacgggagggaaaatagatgagcgaagttattaaaaacagatatgagtttgtagttttatttgatgtggaaaatggtaatccaaatggagatccggatgcaggaaatatgccaagaatagatccggaaagcggcttagggcttgttacggatgtctgcctgaaaagaaaaataagaaattatgtggaaacagtaaaagaggatgcacagggttacaaaatttatattaaagaagatgttccgttgaatcgaagtgaccgaacggcatgtgaaaatgttggaatcaaagaaacagatgataagaaagtaacggaagcattaaaaaaactgaaaaaaagtgatccgggtgtggattcaaaattgcgggattacatgtgtgaaaattattatgatatcagaacttttggggcagtaatgactacttttgtaaaagcttctttaaactgcggacaggtgcgtggcccagttcagcttggatttgccagaagtatcgacccagtgatcagtcaggaagttaccattacccgtgtggcaatcacaacagaaaaagatgccgaaaataaaagtaccgaaatgggaagaaagagtattgtgccatatgcattgtatcgcgcagagggctttatatctgcaaatcttgcacgaaaaacaacaggatttacagaagaagatctggaacttctgtgggatgcgatcataaatatgtttgaaaatgaccattcagcagcccgtggaaaaatgtcagtacgtgaactgatcgtgtttaagcacagtaaagaattgggagattgtccggcatataaattgtttgatgcagttgaagtaacacgaaaagaaaatgtagaatatccgagaagatatcaggattatacagttgaaattcataatgataaaataccggaatctgttgaagtaaaaaggatgatttgatggagtatacagaagatgattatttgatgatatcaggtatacagcattttaaattttgcagaagacagtgggcattgatccatgttgagcagcagtgggcagaaaatgttcatacagctgttggaaaactgatgcaccagaaggtacatgatccatatttgacggaaaaaagaaaagatactattttggtaagagctttgccggtttcttcaagaattatgggagtgagtggagagtgtgatcttgtagaatttcataaatgtgaagatggaatacggcttcatggacatcggggaatgtattctgtttatccggtagaatacaaaaaaggaaaagaaaaatcaacagatgccgatagattgcagcttgtggcacaggttttatgtctcgaagaaatgttttctgcaacaatacctgaagcagctcttttttatggagaaacaagacgaagagaagttgtggaaattacagaggatctgagaaatgcagtcaaagatatatttgaagagatgcatcagtattacaatagaggttatactccgaaggtaaaaacaggtaaaatgtgtaattcctgttcattaaaggaactttgtctgcccaaattaaacaaacaagtttctgtgaaacattatatagaccagatgctgaaggaggaagagacatgaaaaaacttttgaatacgttgtatgtaacttctgaaaacagctatttgggtttagatggagaaaatatagttgtttttgaagaggataaagaaaaaggaagacttccattacataatctggaagggatagtttcctttggatacaggggcgtcagtccggcattgatgggatcttgtgcagaaaaaaatatctctctttgttttatgacgccccagggaaaatttcttgcgaggataaccggaaagacaagaggaaatgtgcttttgcgagaacagcagtatgcaagcagtttggattcagcaatcagcctggaaattgcaaaaaactgtatacttggaaaggtgtataatgcaagatgggtgttggaacgctgtgttagagatcatagtatgcaggtagatgcggacaaaataaaaatagcatcagaaaagctgaaacatacgttgggattaattcaaacatgtgaatcaaaagcacaattaagaggttttgaaggggaagcggccagcgtgtattttggagtttttgatgaaatgattttgcaacagaaaaaggatttttcatttcaaggaagaaataaaagaccaccgttagataatatgaatgcaatgttgtcttttgtatatacgttgttgacaaatacgattgcttcttccctggagtgtgtggggctggatccttatgtgggatatcttcataccgaaagaccaggtagagtatcactggctttggatatgatagaggaattaagagctgtattggcagatcgttttgtattatcgcttgttaacaaaaagattgtaaatggaaagaattttaccaaaaaagaaaatggagctgttctgatggatgatgagctgcgaaaaaagctgttggtagaatggcagaagaaaaagaaggaaaccatcacacatccgttcttgaaagaaaaggtggaatggggaatggttccttatgtacaggcaatgttgttggcaagatatttaagaggagatttggacagttatccagtgtttttgtggaaatgaggtgacaaagtgttggtagtgattacttatgatgtaaatacagagacaactgcaggaagaactcgtttgcgtaaagtggcgaagcaatgtacaaattatggaagaagggtgcaaaattctgtatttgagtgtattttggatagcgctcaaagtgttgctttgaaggggatattgtctgatattattgacaaaaataaagatagcttacgtttttattacctcggaaataattatcagactaaaatagaacatgtaggtatagaacgtggaattccagtagatcaacctttaattatgtaggtgcgaatcagaagtacacataaaatgccggcaggattcgcactacaaaaatcagaaaagtaacatgaataacactaaagaaaagagagaagggataataaaaagtagaaaaattatatttattgcataaaaaaacaaagaatatttgtgaaaatttgccgtcgttccccacgagggaacgtggattgaaatctcctgaatcaataacaaactgctttgcgattggtcgttccccacgagggaacgtggattgaaatagctgtcgctgcggaagtttcgcatcgctgaatgtcgttccccacgagggaacgtggattgaaataaccctatggagaacctgtcacagactgccgggcccgtcgttccccacgagggaacgtggattgaaatagaaaggagcagtcatgaaagcactaaccattagtcgttccccacgagggaacgtggattgaaattgaatacgtcgtatcaaaattgcacgtcatatccgtcgttccccacgagggaacgtggattgaaatatgtcgtgccagctgctccaccggcataaaaaatgtcgttccccacgagggaacgtggattgaaataacaaatgtgtcagttgccggtgctgacggtgggtcgttccccacaagggaacgtggattgaaattggtgtgtgccattcccattttccttgtatccggtcgttccccacgagggaacgtggattgaaatatgtcgtgccagctgctccaccggcataaaaaatgtcgttccccacgagggaacgtggattgaaatgctacagtatcggcattaatggcctgctggattccgtcgttccccacgagggaacgtggattgaaatggtaatgaccggggacaatgaatttgccaagaagtcgttccccacgagggaacgtggattgaaataagatacaaggcggctgcctcctcgtaaaaatcgtcgttccccacgagggaacgtggattgaaatctcaacaatggtataggttcctactggaatatagtcgttccccacgagggaacgtggattgaaatggatatgctttaccgcaaccagccagcatagatgtcgttccccacgagggaacgtggattgaaatcggcaaggggaaaggaagatcaaataaggacctcgtcgttccccacgagggaacgtggattgaaatctgctgattgggataacttagaggtttctccatggtcgttccccacgagggaacgtggattgaaatcttagaagaaatcatatcgctggtgtccgattcgtcgttccccacgagggaacgtggattgaaattcgatcaggagcggttgaaggatccccagaagctgtcgttccccacgagggaacgtggattgaaatataagaactgccgccccactgtgcttttacaccgtcgttccccacgagggaacgtggattgaaatcgcttactccacgagttacagtatactgccaccgtcgttccccacgagggaacgtggattgaaattatcacaggtcagcagaaaagttgtggtacatgtgtcgttccccacgagggaacgtggattgagatcatagtaaatggtatttgtaatagggctaacaccgtcgttccccacgagggaaagtggattgaaattctgtctttgcggtgatctcgtgcggatccggaagtcgttccccacgagggaaagtggattgaaatggaaaagaagcaatgtctgggatgcttgctatcgtcgttccccacgagggaacgtggattgaaatctggatatgaccttaattttttttcgcatttcgtgtcgttccctacgcaggaatgtggattgaaatcccgatcacatatgcgatcactgtagctccagccgtcgttccctacgcgggaacgtggattgaaatgcaaagtagttagctgcattctggtaatatgccgtcgttccccacacaggaacgtggattgaaatgagtgtagaagatagtgatagcctggttgatgatgtcgttccccacgagggaacgtggattgaaatatcaacgcaaagagattcgtggagattgaaagggtcgttccccacgtgggaacgtgaattgaaataacaaagaggaaatcaaacggtgtggtacatgggacattccctatgcggggacaaaaaccggaaatcgcaattaatacttgcatttaacagacattggtgttacaatgaacgaaactaagaacttgttggcataggagtgggcgagagcccgctcctatttgctgagaaggaatttgttcagaaataggcagaaataggaaaggcaggtgggaagcatgagcagacgggaagaatatgaacagaagacagaggcgatccttacaccaatcgtggagtccaggggctttgagctggtagacgtggagtatgtcaaggaagccggaacctggtatctcagaggctatatcgacaagccgggcggaatcacagtcaatgactgcgaggacgtaagccgtgcattcagcgatatactggatgagcaggatttcatcgaggacagctacattatggagatcagttctccgggacttgaccggcctcttaaaaaagaaaaagactttaagagaagccttggcaagctggtggagatccgtacctaccggcccatcgagaaacagaaagaattctgcggtattttaaatgcatatgatagtaacagtgtgacaatcgatgaagacggcacagaacgtacctttgataaaaaagatattgccctgattcgtctcgcgatcgaattctaaaagagaatcgaatctgtaaaattcaggaggaaaaaagaaaaatgagcagagatttaagagatgcgctggacgttctcgaaaaagagaaaaacatcagtaaggatacactgctggaggcaattgagcagtcactgatccaggcatgtaagaaccatttcggaaaggcagataacgttcacgttatgatcgatccggagacctgtgacttcagtgtttacgctgacagaactgttgtagagcatgtggaggatccggcgctggagatttctctggtggatgcacagaaaacaaacacgaacgcagagatcggtgatgttatgaaggttgagatccagtccaaggaattcggacgtatcgcaacccagaatgcaaagaatgtcattcttcagaaaatccgtgaggaagagcgtaaagttctttacgatcagtactatggaatcgaaaaagaagtggtaaccggtattgttcagagagtaatgggcaaaaatgtcagcatcaaccttggtaaggcagacgcagtacttacagagaacgaacaggtaaagggtgagaccttccagccaactgagcgagtaaaagtttacattcttgaagttaaggatacaccgaagggaccgcgtatcctggtttccagaacacatcccggtcttgtaaagagacttttcgagtccgaggttgcagaggtaagagacggtaccgttgagatcaagagcattgcccgtgaggcaggctcccgtaccaagatcgctgtatggagcaacgatccggatgtagatgctgtgggagcatgcgttggtatgaacggtgcacgtgtaggggcagttgttaacgagcttcacggtgagaagatcgatatcatcaactgggatgagaacccggcgatccttattgagaatgcattaagccctgcaaaggttatcgcagttatggctgacccggatgagaagaccgcactggtcgtagttccggattaccagctttcccttgctatcggtaaggaaggacagaacgcacgtcttgctgcaagacttacaggcttcaagatcgacatcaagagcgagacacaggcaagagagtccggtgacttctacgatgattacgatgaggaacacgaggaagcagaggaagaaatgacagaagaggctgtttccgaagagcttgaagaagtagaggaagatacagaagagacagaaacagaagctgaagaaacagcagatggagatgccgaagaataatgaaaacgagaaccaagattcccatgcgtcagtgtaccggctgcagggaaatgaaaagcaaaaaggaaatgatacgagttctcaggacatcagagaatgagatcatcctggacgctacaggtaagaaaaacggacgcggcgcatacctttgtttctcagaggaatgcctggaaaaggctatcaaaaaccatggcctggagcgttccttgaaaatggcagttccggatgaagtgtatcagaacctcaaaaaggagtttggatcaattgaaaaacaataaggttttatcactcatcggacttgcgacaaaagcaggaaaaacagtgagcggagaattttccacagagaaatccgtaaaaacaggaaaaggttttctggcactggtggcagatgatgcctccgaaaacacaaaaaagaaatttcggaatatgtgtacctattatgaagttccgttatatttcctttcagacaaagagagcctgggcagagcaatgggcaaagaattccgtgccagccttgccgtgcaggacgaaaattttgcaaaggcgatcatgaaggcgctggaaaaagaatccggcagataacctgcatgatacaggcgtctgtaaggaggtttgacgatagaaatgataaaagataaattcaacagatcgggaaaggagcaatatagacaattggatactccaaaaacagaagaaaagacaacaacggtgaatacagagggtaacaaatctgaagcaccgaaaaagaaaaaaaatatcatccgtgtatttcatgcacagaatgccagcgatggcggtaaaggaagaagaaaaccggcagcaggcgagagaaagggaccggcacgtccacagaacggcggtcagagaagcgcaggagcaaacacaagaaatggtgagtccggtgagcagagaaacggtcagagtggtcagaatcgtactcagggcggaagaccgcagggcaaccgtccggaaggaagaagagacggaaatcgtgacggaagaaccttcgagggaagaagagacggaggaaatcgttttggcggaaaccgttcccagaatggtgagggacgtccggcaagacagggcgagggaaacagaggcccacgtcagaatgacggaagaggcggaagccgtttcggcggtggagcaaaccgtggccagggaggtcagggcggaagctttgaaggaagaagagacggaggaaatcgtttcggcggtggagcaaaccgtggccagggaggccagggcggacgttccgaaggcggaagaggcggagacaaccgtttcagcggagcaaaccgtggtggccagggcggcggacagcgtccgggacagagaagaagcggtggctcttcagatgctgtattcactccggagctgaccaagacatccaaggacagcaagcgtgagcgtgacagagagaataagaacaagaagaaagaattcgagaaaggtacccagggcggacgcagaccaaatcagggcggacgcagaccgaattccagaatcccgaaagcacttcagaaaccgaatccacagccgaagcaggaagagaagaaaccggagatcaaggagatcaccattccggagaagcttactatccgtgaacttgcggacgcgatgaagatgcagccgtcagtgatcgttaagaagcttttcatggaaggtgtcatggtaaccgtaaaccaggagattgactttgaaaaggcagaggagatcgcacttggctttgatatcattgctgagaaggaagaaaaggtggatgtgatcgcagagctcctcaaagaggacgaagaggatgaggatgatatggttccgagacctccggtagtctgtgttatgggtcacgttgaccatggtaaaacatctcttctggatgccatccgtaatacaaacgtaaccagaggcgaggccggcggaatcacacagcacatcggtgcttacgtggtaaatatcaaaggtcagaaaatcacattcctggatacaccgggacatgaggcgttcacagctatgcgtatgcgtggtgccaacgctacagatatcgcagttctggtcgttgccgcagacgatggtgtaatgccgcagacagtagaggcgatcagccatgcaaaggcagccggtgttgagatcatcgttgccatcaataagatcgataaaccaagtgcaaatgtagaacgtgtaaaacaggagctttccgagtatgaactgattcctgaggactggggcggaagcaccatctttgttccggtatccgcacatacaggagaaggaattgagaatcttcttgagatgatccttcttactgctgaggtttccgagctcaaagccaatccgaaccgtgaggcaagaggtcttgttattgaggctcagcttgataaaggtaaaggaccggttgctaccatccttgttcagaagggtactcttcatgtgggagactttattgccgcaggtgcatgcaacggtaaggtacgtgcaatgatggatgataaggggcgtcgtgtaaaagaggcaggtccgtctactccggttgagatcctcggacttggcgatgttcctaatgcaggtgagatcctgatgtcctttgagagcgataaagaagccaagaactttgcaggcgcattcgttacagagaacaagagccgtctcctcgaggagaccaaaggcaagctttctctggataacctgtttgaccagatccaggccagcgatcttaaggagcttccgatcatcgtcaaggccgatgtacagggatctgttgaggctgtaaaacagagccttaccaagctttccaacgaggaagttatcgttaaggtgatccatggcggtgtaggtgccatcaatgagtctgatgtcagccttgctgcaacatccaatgcgatcatcatcggctttaacgtacgtccggatactacagcaaaacagcttgctgagcaggagggcgttgaccttcgactttataaagtcatttatcaggcaatcgaggatgtagaggcagctatgaagggtatgctggatcctgtattcgaggagaaggttatcggtcacgcagaagttcgtcagctgttcaaggcatccggtgtcggaaccatcgcaggaagctatgtgctggatggtacattccagcgtaactgtaaggttcgtatcacacgaggtgaggaccagatcttcgagggtgagcttgcatccctgaagagatttaaggatgatgtcaaggaagttcgtgccggatatgagtgcggtcttgtatttaatgactttaatgatgtcaaagaagaagataaagtcgaagcatatatcatggtagaggtaccaagataggagtgattcgtaatgagaaaaaacagcattaaaaatacacgtgtgaatggtgcagttcaaaaagaactcagcaccatcatacacagcgagatcaaggaccccagaattcatccgatgacttctgtgacagctgttgaggtggcaccggatcttaagacctgcaaagcttacatcagtgtgctgggcgagaaacaggccaaggattccaccctccggggcttaaagaatgcagagggctatgttcggagagaactggccagaagactgaatctccgcaatacaccggagatccgttttgttctggatgagtctattgaatatggtgtaaatatgtcaaagaagatcaatgacgtaatgagtgggatggaaacagaggaataggtggaaaaaatgaaaaacatttcagaaatactggaaaatgtaaaaaccgttggcattggcggtcacatccgtccggatggagactgcattggttcctgtatggctctgtatctctatatccggaaatattttcctgatatagaagcagatgtttatctggaagaccggaaacctgtatttgattacattgacagaatggatgaggttaagacagaagcagaagaagataaggtgtatgatctttttatcacctgtgatgtcagcgcacttgacaggcttgctgttgctcggaaatatttcgatgcagcaaaaaagacagcctgcattgatcatcatgtgagcaataacggatttgcggatgtcaatcatgtaagaggcgagatcagctctgccagcgaagttctttacggacttctggattcagacaagatcgatcgttctattgcggttcctatttatacaggaatggcacatgataccggcgtgttccagtattcttccacaacaccggaaaccatgaggatcgccggagaactgatgaaaacaggatttgatttcagcaggattatcgatgagtccttttaccagaaaacatatcttcagaatcaggtcatgggacgtgtcctggcagagagtattctccttcagggcggtaagtgtgtggtcggatatctgaaaaaacgggagatggatttctacagtgtggaaggaaaggatctggagggaatcgtgagccagctccgtctgactgctggtgtggaggttgcgatctttatctatgagatgcagacgcagctctttaaggtatctctccgttccaatggtaaggtggatgtaagcaagattgccgtatttttcggaggcggcggacatgtgcgtgcagccggctgtgatatgcagggctccatgtacgatgtgatcaataaccttactgctgaaattgaaaaacagcttgcagaggagtaaagataagatcatggacggaatacttgtgatccgaaaggaaaaaggttatacctctcatgatgttgttgcaaagctgcgtgggattctccacatgaaaaagattggccatactgggactctggatccggcagcagagggagtacttcctgttgcactgggcaaggggacccggctggtggagcttcttacagaaaaagaaaaaacatatgaggcggttttaaggctgggagtttccacagatacccaggacatgaccggagctgttctttctgagaaacctgttaccgtcacggaagaggaagtccgtgaggcagtgggatcctttgtgggagaacagcagcaggtccctcctatgtattcggccctgaaggtaaacggaaagaagctttatgaactggccagagaaggaaaaaccatagagcgtaagccgcgccctgtggttttttatgagataaggatactggatatggagcttccgctggtacgcataagcgttacctgcagcaagggcacctatatccgtacactttgcaatgacatcggagaaaaattaggctgcggcggagccatggaagagctgcttcggaccaggtccggaaatttcactctggaagagagcatgacactttcccaggtggaggaagcggttgccgatgggaccatcggggaaaagcttgtttccatcgaggatgtactttccatgtatccggtccttacctgtacaccggagggagacagacttctcaataacggaaacccgcttccggaagaactggtacagggaggcagcagggaagaaaaagtccggatgtataaaagcagcggaaatttcacaggaatatacggctgggatgaaagaaaacagaaatacgtacccatccgcatgttttttgtatgacattttataaaaacttgcaggagcagcagaagatatggaatacttgaagatcgacggagaatttccgcgcctttcaaagagtgcggtgacacttggaaaatttgacggcatacaccgtggacaccagaaactggtggagaagatcctggaacagaaagaaaaaggtctgcagacagtccttttttctcttggcatcggcagtcagatgatctttacaaaagaggaacgatgtcagcttcttgagaaagcaggcgtggatgtgctgatcgaatgtccgctggataaccggatccgtcatatgaaggcggaaacctttattaaagaaatcctggtgggagatcttcaggcggagcatgttgcagtgggagaagatttcaggttcgggtatgaacgcaagggaacaccacagcttctggagactatgggaaggaagcttggctttactgtggatgttgttccgaaagaaatggaaggccgcagaaagatcagcagtacatttatccgtgaggaactgaaaaagggaaatatggaaaaggttaatgatctgctgggaatccccttttttgtggacggtgtgatcgaacatggaagaggaatgggacataaggtccttcttcccactaccaatatcgttcctgcaaaagaaaagctgatgccgccaaatggcgtttatgatacagtgtcccattttaaggacagaaccctttgcgggatcacaaacgtaggatataaaccaaccatcggagagaaattcctgggtgttgagacctatctttttgactgcgaggaggatctgtacggagagccctgcagagtggaattctttcattattccagaccggagaagcgcttttcgtccatagaagcactaaagcagcagctcctgaaggatgcagaaaagggaaaggcttatttccgcagtctcgaaaaataaaaactttcgggaaaaacttttcgaaaaaacagtttacaggtcagaaaccgtgtgctatactgttcgaggtgaaaaaagccagtattcagaagccggagactccgaccacttcttaatacccggcgtttaattaaaatttcaaggaggaaacaacaatgatttctaaagagaagaaaacagcgatcatgaaagagtatgcaagaacagagggtgacacaggttcaccggaggttcaggttgcagttcttacagcaagaatccaggagctcacagagcatcttaaaacacaccacaaagatcatcattccagaagaggtcttctgaaaatggtaggtcagagacgtggccttcttgcttatcttaagaaaacagacatcgaaagataccgtgcactgattgagaaattaggtttaagaaaataattgctacgggaggggcggatgattccatccgccccattttaacatgtgtgataaacacagacggaattaccgcaggagtgatttccgagactactgaaaagcccatttccggtcgagatctttttcaaaggaagtggtcttttcagttgtttcgggctcctgtcagatattaatataataagaaaaggagaacgaatatgtacaaaagttattccatggaacttgcaggaagaacactgactgtagatatcggacgtgtagcaaaacaggccaatggtgctgctcttatgcactatggtgatactacagtccttgctactgctaccgcatccaaagagccgagagaagggatcgatttcttcccgttaagcgttgagtatgaggagaagatgtatgcagtaggaaagatcccgggaggcttcaacaagagagagggtaaggcaagcgagcatgcaatccttacatcccgtgttatcgaccgtccgatgcgtccgctgttcccgaaggattacagaaatgacgtaactctggtagatatggttatgtctgttgatccggaatgcaatccggagatcccggctatgcttggttcttccattgcaacctgtatttctgatatcccatttgacggtccatgcgcaaccacacaggttggtatgatcgacggcgagtttatcatcaacccgacacttgcacagaaggcagtttctgatcttcagcttacggttgcttctacaagagagaaggttatcatgatcgaggccggagctaatgagatcccggaagataagatgatcgaggctatctacaaggctcatgaagtgaaccaggagatcatcaaattcatcgaccagatcgtagcagagtgcggaaaagagaaacattcctacgagtcctgtgcagtacctcaggagctttttgatgagatcaagaagatcgttcctccggaagagatggaggttgccgtattctctgatgacaagcagacacgtgagaataacatcagcgagatcactgataagctgaaagaagcttttgcagacaatgaggaatggcttgccgttctcggtgaggctgtatatcagtaccagaagaagactgtccgcaagatgatcctcaaagatcataaacgtccggatggacgtgagatcagacagatccgtccgctggctgcagagacagatatcatcccgagagttcacggttctgccatgttcacaagaggacagactcagatctgtaccgttactacacttgctcctcttacagaggcacagcgtcttgacggactggatgagtttgagacatccaagagatatatgcaccactacaacttcccgtcctactctgtaggtgagaccaagccttccagaggaccgggacgtcgtgagatcggtcacggagcacttgctgagagagcactggtaccggtacttcctacagaggaagaattcccatatgcaatccgtaccgtatctgagacatttgagtccaacggctccacatcccaggcaagtatctgtgcatctaccatgtcactgatggctgccggtgtaccgatcagaaaaccagttgcaggtatttcctgcggacttgttacaggtgaaacagacgatgattacatcgttcttacagatatccagggccttgaggacttcttcggagatatggacttcaaggtagccggaacacatgacggaatcacagcgatccagatggatatcaagatccatggtcttacaagaccgatcgttgaggaagcgatccgcagaacaaaagaggcaagagaatatatcctgacagaagttatggagaaatgtatcgacaagcctcgtacaactgttggggagtttgctccgaagatcatccagatccagatcgacccgcagaagatcggtgatgtagtcggacagagaggaaagactatcaacacgatcatcgagcgtacaggtgtgaagatcgacatcacagatgacggcgcagtttctatttgcggaacagaccagaagggtatggatgaagcaaaacgtatgatcgagatcatcactaccgagtttgaggcaggacagatctttacaggacgcgtagtcagcatcaaagagtttggcgcattccttgagtttgcaccgggcaaggagggaatggtacacatttccaagatctccaaacagaggatcaaccgtgttgaggatgttcttacacttggcgacaaagttaaggttatctgccttggcaaggacaagatgggaagaatcagcttcagcatgaaggatgtaccggaagaagcataaatgatgagataccacaatattaccaaggacgatatgttaaacggagacggacttcgtgtagtgctctgggtagccggctgttcacacggctgccgggagtgccagaatcccattacctgggatccgaatggaggtctgccctttacggacagcgagcgagctgagatatttgcagagctggacaaggattatatcagcgggatcaccttctcgggaggcgatcctttgcatccttccaatatcgctgaggtaacagctcttgcaagagagatcagagagaagtatccggataagacgatctggctgtatacgggttctctctgggaagaaatccagcagtacgagatcatccattatctggatgtatgcgtggacggggaatttcaggtggacaagaaagaggttcgtctgaaatggaaaggctcctcaaatcagagggtgatcgatgtacaggcgtcacttcgtgagaaccgtgtggttctgtacacggagtgatcagaggtttttttgaaattacctattgggagtggaacgaaaaatgaaaagaattgcgaaatttcacaaggtaagttttgaacagtttgcaaaggactggaaggatacctttgaacagtattcagaagaggagatccggaatatctacgacagtctgaagcttccgaagagagctacgaccggaagtgcaggatatgatttttatgcacctgtggatgcgaccatgaagccaggtgagatcgtaaagataccaaccggtatccgtgtagagatggaagagggctgggttctgaaatgttatccgagaagcggactgggatttaaattccggctgcagttgaataacacagtgggaatcattgacagcgattatttcttttccgacaacgaaggtcatatctttgccaagctgactaacgatacaagagaagataaaacgatccagatcccggcaggaaccggttttatgcaggggatctttgtggaatacggaatcaccgtggatgacgatgcagatgcagtaagaaacggcggcttcggaagtaccacaaaataaaacaaaagcccggaaggcggaggtgtgaagaccacatacatccgattttccgggcttgttttgtgtagttactgctttctgataaatgcacggtttagctgagaggtgcgtctgcctcctcgtctgcacgtgctttttccacgactgcgttaaaggcatttgcggcagcgtcgtactcttcatcatcttcaatgtttgccagcatcggatcgccgtctgctgtgcgagagaagctgtagagataaacctcaccggtctcattctggccgttctcatccagtgggagaagtgcgatatattctttgttctctacagggaaaatagtaaggatggcacattctacctcagtatcatcatccatagtcagggtgatggtatgatgtgcttcatctaccctgctttcacagttagctgtgcaggaagcgcagtcgcttggtgcacatccgcttttgttaaattcatcactcataaaaaaatcctccgttctgctgctgcctgtaaataagagggcagctctgcatgatataaagaacattttaacagatatgacgtagaacagcaacaaaatatttgagagcctgagaaaactttcaaaatattttttgcttaatccgacaatgtgagatataataaaaatatgacgaaaaaatgaggagaaaatataaaaatatgaaatttatttcctggaatgtaaatgggatccgggcctgtatcaccaagggctttaaggaacgctttcatgagctggatgcggatattttctgtctgcaggagacgaaatgccagcagggacaggtgaaactggaacttcccggatatcatcagtactggaactacgcaaaccgcagaggctattcaggtacagccatttttacgaagagggagccattgtctgcagtttacgggatcgggatagaggagcatgataaagaaggacgtgtcatcacgctggaattcgatgagtattattttgtgactgtatatactcccaactcccagagcgagctccgccgtctggaataccgtatgaaatgggaagaggattttttggcttatcttctgaaactgcaggagaagaaaccggtgatctgctgtggcgatcttaatgtggcacatcaggagatcgatctcaagaacccgaataccaaccgcaaaaatgcaggctttacggatgaagagagagcctgctttaccagagctcttgagagtggctttattgatacattccgctatttttacccggataaagagggcgtttactcctggtggtcctaccgtttccgtgcacgagagaagaacgccggctggcgtatcgactatttccttgtttccccttccctgaaagaaaagcttcaggatgcgaagatccacggagagatcatgggatctgatcattgcccggttgagctggatattgatctgtgacggatccggtgaaacggatttccatggatttgaataataaaaagagaaaaggaggagttgccttggcaagccgcagattaggtcgagtggaaaaaggtcagccgctgatacttggagccaacagaatggagggcggttataattttgcagtggaggcatcggaggattccgaagtgtccctgcttttatataaaaaaagaggagctgccgcaccggtggagattgtttttccaaaggatttccatacaggacgtgtgtgggcactgaagctgtgcagtgcttctctgaaggagtttgaatataattataaaatagacggtgagatcgtgcaggatccgtatgcatacggacttcacgggagagagcatttcggagtaccttacgatccggaaaaggaggtccgctgtcgcttccttaatgagaatgtttccggctgggaaaatgaaactgcaccggcagtagaatatgaaaatatgatcctgtacaagcttcatgtccgtggttatacgaagcttgccagaaagatggtttcccataaggggacttttcttggcctgacagagatgatcccttactggaaagaacttgggatcaatgccattgaactgatgcctgcctatgaattctgtgaggttccgatcagtaaaccgaaggaaggcagtgaacacatcaagacccgtcgaaaggaaaatgtagtgaattactggggctatgcatccggcttttatttcagcccgaagagtgcttactgcagcaccagagaaccggagcaggaatttcggtatatgatccgggagctgcacaagaacggcattgcctgtatcatggaattctattttccggaggaaacagacagcctgatggctcttcgagctttgcagttctggagagatttttaccatgtagatggatttcatgtgctgggagagggctttaaccgggagatgcttcttcgggatggaatcctttctggagcaaaactgatcttccagggctttgattttgatcatttttacagaggaaagcttccggccagacgttacggagcggagagcaatatgaattttctccaggatatgcgccgtttcctgaaaagcgatgaaggtatggtggaggctgcagcatggcatatccgtcataacagcgagaatcatggagtgatcaattacatggtctgccaggacggatttaccatgaatgacctggtgagctacaattataaacataacgaggccaatggcgagggcaatcaggacggaagcagctataattattcctggaactgtggtgtggaaggccctacccgtaaggtttccgtccgtcagatgagggaacgccagatcaaaaatgcctttctgatgatgctgctgagtcagggtgttcccatgatctatcacggtgatgaattcggcaattcccagagcggaaacaataatgcctactgtcaggataatgctaccggctggacagactggaagggcctttccagaaaccagggactgaggaaatttgtaaaggatgccattgcttttcgtaaggcccatcccgttcttcatatgccggtggaactgaaaggggtagattatctgaccaaggggttcccggatgtgtctcttcacggggaacgtgcctggtatctgagctatgagaataccagcaggcttcttggtatgatgtactacggagcctatgcaagggaaaaagaggatctggaggttgcagaggatgattttatttacatcggctataatttccactgggaaaaccggagccttgctctgcccaatctcccggaaggcatgtgctggaaaaaaatcgcagatacctctcttcacggaacaggattctgtctggaggaggaagaagaatataaaaaatcaatcgaaataggcccccgcgccattgtggtattgctgggcagacaggaggcggagaaagatgcgatcatggcacccgtggctgcacttcaggaccatcacgaggcataagcttctggtgatgaaatattgttttcgtatcgggttatataagcaggggttgcttcatgacctgtccaaatattccccgacggaatttctggtaggctgtaaatattatcaggggacaagaagtcccaacaacgcagaacgtgaggcaaccggcgtatccatgtcctggctgcaccataagggaagaaacagacaccattttgaacattgggtagactattcccttgacggtgagcatgtgatcatgggagccagaatgcccagaaaatatgtggcggaaatggtcatggaccggatcagtgcatccagaaactatctgggagaggaatatacctatcatgaaccattgcagtattttctgaaaagcaaggagaagctgtggtttatccacccacagacaaagaaagagctggagggacttctccggatcctggataaatacggagaggataagaccctgtggtatatccgcaatgtatatctatgtgataaccgcggaaaaaaagtgaaaagccctgggaaaaagcttcgaaatcacagataggggtgtatttttggcaggttgtctgatataatattcagatatcaggaggaagaatgaatggatacaccaacaattgcgaaatactatagagagaaagatcccatggagcgcctgaagcttctggagcagtccattgcagcaggagaagaaccggaagaaaacaggatccgcaaggaactctgggagatccgttacagcgataaagctgagactggtgataccagggcagacggttatctcggtctctggatgaccatggagtttaaccggaattccgcttccagattctttggtacaagaagtgcgaagaaagagataggcaagtatcttaagaagctgaaatttcaggagctccaggaaaggggcggcctttatgaggagcttctttaccgggaatgctgtcatctggttctggtctacatggatctctgtcagacagataaatcctataacacaacgattttcggcctgatccacatcaaggaggacagtgcgaaggccaaggtccagagagacatcagggaaacagctgtggagcttccggctaatcttggaatggaagctgagcttggaatcatcacaagagctgccagagagatctacaggcagtattatcccaacgaaggaaacatttaggaggccggagagcttccgtttcaggctgtctgactactcaggcagccttttgttgccttgcatccgataaaatattctgagattttttgaacgaagatccatgtcgggtgtgaagagaaacattcaggaggttactattttatgaatcccaatcatctgaaagcatatgaagtcctgaaggaagaggagcttcaggatattcattcaaaaggatggcttctgagacacaaaaaaacaggagccagagtgatgctcatcgagaatagtgatgagaataaggtttttaacattgcattccgtacaccgccgaaaaacagcacaggtgttgctcatatattggaacacagcgtactgtgcggctccagggaatttccgcttaaggatccttttgtggagctggtaaaaggttctcttaataccttccttaatgccatgacctatccggataagacctgctacccgatagcaagctgtaatgaccgggatttccagaatctgatgcatgtatatctggatgcggtattctatccgaatatttacaaaaaagaagagatcttccgtcaggaaggctggaactaccatctggagaaaaaagaaggcccgctgaaatacaacggtgtcgtttacaatgaaatgaagggtgctttttcctcaccggatgatgttctggagcgtgagatcatgaattccctgttcccggataccacctatggctgtgagtccggcggagatcctgtaaatatcccggatctcagttacgaggaattcctggatttccacagacagtactatcatccgtccaacagctttatctatctctatggaaacatggatatggaggagaaactggagtttattgacagccattatctgtctgcctttgattcccttgccattgattcccagatccgggatcaggaagcttttgcccaggtaaaagatatccagaaaaattatccggtgtcagaggacgaaggagaagaggataacacttatctttcctacaatatggttgtgggtgaagcagcagatatcaacctgagtcttgctttcgaggttttggattatgctctcttaagcgcaccgggtgcaccactgaagcaggcacttttggatgcaaagatcggcaaagatatctacggctcctttgaggacggtatcaagcagacctatttctccattgtggcaaagggagcaaacttaagtcggaaagaggaattcataaaggtgatccgtgacactctcacaaagatcgcagaggaaggcatcgacaaaaaggcggtaacagccggaatcaattactatgaattccgtttccgcgaagcagatttttcttcctatccgaaggggctgatgtatggcctggatattttaagcagctggctttatgatgatacgaagccgttctgtgaggtgcagcttctggagggctttgagttccttaagaaagccctggaagagggatattttgaggagctgatccgtaaatatcttctggataatacccatggcgcgatcctttccctggtaccggagaaaggccttgctgctaagagagacaaagaactggaagaaaaactggagaattacagaaagagcctttctgatgaagagcttacccggatggtagagaatacaaaagccctggaagcttatcaggaatccgaggaagatccggaaacactgacctgtatcccgatgctttccagagaagatatcaaaaaagagatcacaggactgacaaacgaggagcaccatgtggaggacagcctgtttctgtatcatgatgtgtgcaccaatggtatcggttatgcagatcttctttttgagatccatgactttgatgttgacacagtccattatctgggacttctgaaatctgtgcttggtgcagtggatacagagaattacacatatggcgagttgtttaatgaagtgaatgcgagaaccggcggtattgcctatgggatagaggtttttgatgatgcccaggataccgatgcattccgtgccatgtttgccgtaagaggaaaagcgttatatccggagatggatttcatgttttccatgatccgggaggttcttacaacttcgaagctggatgacaccaaacgtctctacgagatcattgccagagtgagatccagagcccaggccagccttgcaagtgcaggccattccaccgccgttctccgtggtgcttcctacgcatctccgatggcggcattccaggatgagatggcaggaatcggatattatcagtttatcgaaaaactggagaaggattttgacagctgcaaggatgagatcgtgaaaaatctccgtaaggtgatggaagaggtccttcgtccggagaatttctgtgtaagctataccggagagagagaatctctggatgtagtaaaagcacaggctgccgggatcaaaaaagttttgtttaacggacagaagccggagtctgtgaagcaggccccctgcataaagaaaaacgaagccttcaagacctccggccaggtccagtatgtggcacagaacggaaacttccgcaaaaaaggcctggagtataccggtgcactggagatcctgaaagtgatcttaagctacgattatctctggatcaaccttcgtgtaaagggtggagcgtatggctgcatgagtggctttaagagaaacggagagagcttcctggtatcctaccgtgatccccatctaaagagaaccctggaagtataccaaggagtgccggattatatccgtgcctttgaggcagacgagcgtgagatgacaaaatatattatcggaacgatcagcaacaaggatgtgccgagaactccgcagatgcagggaagtatctcaaaaaccgcatatttctccaatgttacagaggatatgctccagaaggaaagaaatcagatcctcggagcgcagaaggaggatatccagaaactggcagctcttgtagaagcagtactttccgatgatcagatctgcgtagtaggaagtgagactgcaatagagaaggcggaagatgtattcatggaagtgaagccactgatcggctgatgagaaacaaagcctgctgtccgttaaatgggatagcaggctgtgaaaggattatgagaggataaagaatggataataattttagatcaggctttgttgcgatcatcggaagaccgaatgttggaaaatccacgctgatgaaccatcttatcggacagaagatcgccatcacatcaaacaagccacagacaaccagaaacaagatacagactgtgtatacctgtgatgagggacagatcgtatttttggacacaccgggtatccacaaggcaaaaaacaagcttggagaatacatggtacaggttgcggagagaaccctgaaggaagtagatgccattatgtggctggtggagccgtccacattcgtaggtgcgggagagcgccacattgccgagcagctgcagaaggttggagttccagtgattctcatcatcaacaagatcgatacggtaaaaaaagaagagcttcttcctgcgatcgatacctaccgtaagatctgcgattttgcagagatcattccttgctctgccctccgcggaaaaaacacacaggatatcattccaagtattttcaaatatcttccgtacggaccgatgttctatgatgaagatacagttaccgaccagcctcagcgccagatcgccgcagagatcatccgtgagaaggctctgcatgcactggatgaggagatccctcacggaatcgccgttgccatcgaccggatgaagaaacgtccgggaagaagcaacatcatagatattgatgcgaccatcatctgcgagcgtaattcccacaaaggcatcatcatcggaaaacagggtgccatgctgaaaaagatcggaagcaatgcccgctatgagctggagcgtatgctggaagcaaaggtaaacctaaagctctgggtcaaggtgactaagaactggagagacagtgatttcctgatcaagaactttggatatgataagaaagaaatctgaaaatgagtgatctgattaccgtacagggagtggtactttctgccatgccggtaggggattatgacaagcggatcgtccttctcacaagagagagggggaagatctccgcttttgccaagggagcgagacggcagaacagtccgttcatggcagcagctaacccgtttgtattcggaagctttactctttatgagggaaggacaagctataatctgaaccaggtcagcgtgcaacatcattttgtggagctggccacccggcagccgggggtttactatggatattattttctggagctggcagattattttggcaaagagggaacggatgagaaggagatgatgaatcttctctatgtgaccatcaaagccattttgaatcctcatatagaagaccggctggtgcgctgtatctatgaactgcggactatggtgatccagggcgtgatgccgcagctgttccagtgtgcgggctgcgggagagagcttatggaggaagaaaccggagaactttttttctcccaggacgagcatgggatcctgtgtgcggactgcagtaggatggccatggacaggaaacggatctcagcggctgccctgtatgccatgcgctacatagccgtgtcccccctggcaaagctgtatacgtttacagtgcgggatgatgtgctgcgggaactggaacgccacatttaccggtatacggagctgaatacagacaagcggtttaaaagtctggagatcctggaattgatgagatagatcactgccggctgcggaataaccgtaacgatttatttttcaaaagcaggacaggatgcaatgcaaatggaaatatccttgaaaaatcatgaggatactagtataataagaccaaaaatgtaaaaaagcagctttttccggagctttccggacgcatttggcggaacagctgcaagtcaagaggagagaaatcatggaaaagacaatggaaaagatcgtagctcttgcaaaagccagaggatttgtttacccgggttccgagatctacggcggcctggcaaacacatgggattatggaaatctcggtgtagagcttaaaaataacgtaaaacgtgcatggtggcagaaattcattcaggagtctccgtacaatgtaggtgttgactgtgcgatccttatgaacccgcagacatggatcgcttccggacatcttggcggattttctgatcctcttatggactgtaaagagtgccacgagcgtttccgtgcagataaactcattgaggacttttgtgcagagcatgacattgccattgagggaagcgtagatgcatggtcccaggagaagatgatggatttcatcaaagaacacgaggtaggatgcccgagctgtggtaaacacaacttcacagatatccgtcagttcaacctgatgttcaagacattccagggtgttaccgaagatgccaagaatactgtatatttaagaccggagactgcccagggtattttcgtaaacttcaagaacgtacagagaacatcccgtaaaaagatcccgtttggtatcggccagatcggaaaatccttccgtaatgagatcacaccgggtaacttcacattccgtacccgtgagttcgagcagatggagcttgagttcttctgtgagccggatacagatcttgagtggtttgcatactggaagaagttctgccttgactggctgagtgctctcggacttaaggatgatgaggttcgttaccgtgatcatgataaggaagagctgagcttctacagcaaggctaccacagatgtggaattccttttcccattcggatggggcgagctctggggaatcgctgacagaacagattatgacctgacacagcatcagaatgtatccggccaggatctcacatacttcgacgatgagaagaaacagaaatatatcccatacgttatcgagccatcacttggagcagaccgtatggtacttgctttcctctgcagcgcttacgatgaggaagttctggatgcagagaagaacgatgtccgtacagtccttcatttccatccggtacttgcaccggttaagatcggtgtgcttccgctttccaagaagcttaacgagggtgctgagaagatctatcagcagctttccaagaagtacaactgtgagtacgatgaccgtggaaacatcggtaaacgttaccgcagacaggatgaaatcggtactccgttctgtatcacttatgacttcgagtctgagaatgacggtgcagttacagtccgtgaccgtgacactatggagcaggtacgtgtgaagatcgatgagcttgatgcatactttgctgataaatttacattctaagtaaatacattttttaatgaaaaacctccggctattttctggccggaggctttttttcgacaagtctgtttttcatccgccagtttcttggcgacattccgtatacatttttgaaagcccgggaaaaatgcagctgattgggatatccgactgcatttccgatatctgcgatagacagggctgtgattttaagaagttctgcagctttggtcatgcgatagctgatcaggaattcctggggagaacgtccgatggtgtcgtggaagatcttaccgaaatagcttcggttcaggccgcagcaggctgcgatatcctcaatggaaatatcattctggaaattctgttcaataaaagagagcgcctccttgatataaaaatcacggatacttccatcctgtttcatgcggacagtttcagtagagcgcataaagtaatccagaaaaagccaggtatgtccgataagatgaaagggtgattcctgggaattatggctgatataaagcatttcctccatcattttctggcggagatctgcagagtggctgtgatagaccggatggtccggacttaaacctgcagtttccacgatctcttttgcccggagcccgtcaaattccacccaggtgtactcccatggaaagtcggtatctgcaatgtaggtgttgatctgaccgggaaaaagcatgaaaccctggccgctttttacctgataggtgatggtctctcctgcggaattgtctgccatcagagttccggtaccggagatcacataatgaaaaatataatggtttcgtgctgccgggccgaatgaatgtgccggagcgcagtgctcccagccgtattggtataatccgatatcaacaaagttttcatttggaaaaacggagaagagaaggtcattcatatttttatcctttaggcgtatgattttgtctggtttcagtaacattatatattaaaacagcagggaacttcaacatatgtataaaaatgcaattacaaaaacagcctgtaaaatatactaaaaagagaaggataatcgataaaactttgtgagaaaattaagtttctcgagaaacttgttgattttcgataaattcggaatatactaattttagataaaagtagtgatataggcgtaaaatatatcaaaatgctagatgactttaatgaagacagagaaaaattgcattttggcataaaacaagaaaaacactgctatttatgcaagcataaagctatgttaaaatagctttcagaaaaaagaaaccagagaataagtattggagaacccggatagccatatcagttaaatgggtgatatccgacttatcaaataaaaggaaaaggaaggagcattacaagatgcgcaacagaagtaaatggatcctctgtatgggacttgcctttaccatggcagcttccgttacattgagcggatgcggcacaggtaaaaaggacagcggaaagacagagatcgaacttgtgcagtataaaccggaagcggttaaggcatttgaaaaactggaagaaaaattcaatgccactcatgatgatatccatcttaccatcgaatcaccaaacgatgctatgactgtattgaagacaagatttatccgtgaggataatccggatatcattggaatcggaggcgatgttaacttttccaattttattgattctgatatgctgatggatatttccgattatcagggactggattcgatcaaagatgcatataaagaaattgataaagcgctggaattcgttccggaagacggagtctatgcggttccttacgtggccaatgccgccggaatcctttacaatcgtgagcttttcaaggagcatggctggcagatcccgactacatgggatgaatttatgagcctttgccaggaaattcaggatgcaggtatccagccgctttatttcggatttaaagatacctggacctgtcttgcaccgtggaattctattgcggtagatcttgcaccagccgatgtatgccgccaggtaaaccagggaaacactacttttgcaaaagagtataaggaagtagcagaccgtatgctggagcttatccagtatggaccggatgatccctttgcctatgattacaatggagcctgcaccgcttttgcaaaaggggaggctgccatgtatcccatcggaagctatgcgatcccgcagatccagagtgtaaatccggatatggatattgattcttttgtaacaccggcaagcaatgatccgtcagaaaacaaactgaattccggagttgaccttcagttctgtgtgatggatgactgtgagaataaggaagctgcatatgaagtgctggatttccttcttgaggatgaaaatgtacagacatatctggatgaccagaaggcagttccatgtaaaaagggtgatttcacacttccctctactctggatggtatgaaggaatacatagaagagggaaggatggccgactaccaggatcattattatcctacagagatggctgtggatgcacagatccagaccttcctgatgaaaaaggataaagatgcattcctgaaaaaatttgatacagactggacaagatataaccgtgacattatccgtaaagtacaggactatgaggagaagaacggggaaggagagaactgatcatgggaaaaaaatctatgagtggaagaaagctgacctttcttctgatcaccattccgatcgtggcattatttttctgctttaacacactgcctctgatcaagggtgtgatctacagctttacgaactttaaaggctatggaagctatgactgggtaggacttcgaaactataaggatctttttacagacagccgtgttggcggttcctatctgtttacctttaagctggccatcgtggcaactatcgtaacgaatgtactcagcctgatcctggcacttggactgaacagcaagatccgtttcaagagtgcaatgcgtggagcttattttattcctaatgtacttggcgcactggtcgtaggatatattttcaattatttctttacatatatcctgcctgcattcggaaagatgatcggaaataaaacattgtcttccagcatgctttccagtacgagccttgcatgggtagccatcgtgatcgtttgtgcatggcagtccatcgcaatgaataccattatctatatttcgggcctccagacagtgccggaggatgtatacgaggcaggagctattgacggtgctaccggattcagtaagttccgttacctgacattcccgctgatcgttccgtttttcagcatcaacatggttctctgtgtgaaaaacttcctgatggtatttgatcagatcatggctttgacaaagggtggtcctgcacagagtacagaatctatttcttacctgatctataacaatggtatgagtggaggacagtttggattccagagtgccaatgcggttatattctttattgtgatcgtgatcatttctgcagtgcagttgactatcacagggaaaaaggaggagcagctgtaatgaaaacgaaagtaagagaaaaagcgaactggccggtaacgatccttctgatccttggccttatcacagtggtatttccgctttatatgacaattgtgatcgcattcaagcagccgacagagatgaccaacagtgtagccgggatcctgtctctgccagagaaattcagtcttgccaatttcagggaagctatggaggtaacagacttctggcattctcttggaaacagtgtattgatcactgtgatcacagtggttcttgctattgtaattcattcacttttaggttatgctatagccagaaacaagagaagtaaattttataaatttatctatctctatgtagtgagcggtatgtttgttccgtttgctatcctgatgatgccgcttgtaaagcagactgctgagatgggtcttgataacaaagtcggtgtgatcattctttacacggtattttatatgcctatgaacgtgcttctttattccggatatctgacaaacattccaatggcccttgaggaggctgcctgtgtggatggagccagcacctggaaaacatactggaagatcatcttcccgatcatgaagccgatgcatgccacggtggcagttctgacagcacttggaacctggaatgatgttatgactccactggttatcatgtccggatctacgggtggaaccacattgcccctggcacagctgaatttccagactcagttcggaacaaattataaccttgcgtttgcctcttatctgctggcactgcttccgatccttctgttttatctgatctgccagaagcacattttaaatggtgttgtaaacggtgccgtaaaataaaaacacaagaaaaaggaggattcacatatgggaatcatctactgcgagaaagacagaacgtttaccctgcagacaaaagaaactacatatcagatgcaggtggatcagtacggatttcttcttcatctctattatggtaaaaaggcagaaggctgcatggattatcttctgacctactatgacagaggattttccggaaatccctatgatgcgggaacagacagaacctattccatggactctcttccacaggagctttcctgctacggaaacggagatttccgcagtgcatcactgatgctggaaaacggtgacggaagcatgagctgtgatatgcgttacaagaactatactatccgtgacggtaaatacagccttccggggcttccggcggtttatgcggataatgaggaggcacagacactggagatcgtactggaggatccggctaccggcgtggaggccatgcttctttacggtgtacttccggaactggatatcattacaagaagtgtctatatccgcaatcagagcagtgagaagatctatgtgaacaaggtgatgtccgcagaactggattttctttacggagattatgacctgcttactttttacggaagacatgccatggagcggaatctgcagagagtaccggtggctcatggaagtcagatgatcggcagtgtccgtggcacatccagccatcagtataatccgatgatgatcctggcagagaaggacacaacagaggatcatggaggctgctatgctatgtcctttgtatatagtggaaatttccagggtgaggttcttaaagatcagtacaatcagacaagaatgctccttggtgtacaggaggagtgcttccggtatccgctggaagccggggagaccttctatgcacctgaggtgatcttaagctacacagatcagggaatgaaccgtctttcccagaatctgcacagctgcatccgtcatcatatctgccgtggtaaatataagacagaggtccgtccggtgctggtaaacagctgggaggcagcatattttgattttacaggggagactttatataatctggcaaaagaggcaaggagccttggtatcgatatgctggttctggatgacggctggtttggaaaacgtgacgatgacaacagtggtcttggggactggtatgtcaatgagaagaagcttggagagactctcggcggactggtaaaaagagtcaatgaccttggagtgaaattcggtatctggatcgagcctgagatgatctctgaggacagtgatctttaccgtgagcatccggactgggcacttacgattccgggaagaaaaccagtgagatccagaaatcagctggtacttgatttttccagaaaagaagttgtagacggaatctttggacagatcagtgcggtattggataatgccaatattgagtacgttaaatgggacatgaatcgaagcctgatggatgtattttccgtaatgaccaaggatcagggacgtgtaatgtatgattatgtcctgggattgtacgattttctggaccgtatggtgaaccgttatccggatcttctgatcgagggctgcagcggcggcggcggaagatttgacgcaggtatgctgtattacacaccgcagatctggtgcagcgacaactctgatgctattgacaggcttcggatccagtatggcacttccttcggatatccggtatcggccatgggagcacatgtgtctgcagtgccgaaccatcagacaggaaggatcaccccgttacataccagaggtgtggttgccatgtccggaaccttcggctacgagctggatcttctgaagctgactgaggaagaaaaagatgaggtccgcagccagattggggaattccgtaaatatgcgccactgatccagaacggacggtactatcgcctgacagatccgtttaagagtgaggtctgtgcatgggagatcgttggaaattctcaggaagaagttctgctcaatgttgtcatggaggagatccatggaaatatgactgtgaattatgtgcagcttcgcggccttgatgagagtgcactttataaggaacagactaccggcaggatctattccggagctgctctgatgcatggtggaatgccgcttcctgcagagtttggggagtacagagcttatcagtatcattttgtgagagaataagagcgtattgagacagtaagataaataaaaggatccgtcatacagacagctgaaaaagccgatgtatggcggatcttttttatcatagctcagtgtacggtgatctgatagctcttgataaattcctcatccggtttcagcacattgatatttgctttttcggaaagaggtttttcaaaaccacagtcatcacagcgtcccatccacggctccaggcatacgaagggagcaccgggtacggaccagataccgaaattcgggaagccctcactggtaagtgtcagatatggagttccgtccgggaagaggataccggccttttggatctgaccgttatcaaaaacaagagcgtctttatcaaacatatgaggagcaatggaacaggttccgttttcaagggaaagtgtatgtggctcgtcagcaaggactgttcctacagacgtatcgataaggagataggtaagagtgtccaggccttcaaaagcaagacggtaatcactctgggattcgccttcacgtaccggaacacggaatgccggatggccgccgatggtaaaatacatagtttcagaatcattattaactacttcccagcatacttccaggtcgtgcttcttcagagtgtaggtgatcttcagagcgaaagcaaacggataaacattcagggtttcttcagaggacttaaggacaaaggaaagggaagtatcggtgatatccgtgcagataaaatcgctgtcccttgcaaagccgtgctggctggaaggatattcctttccgttcagacgccagatatctttgtagttacgtcccacgttgggaaaaagtacaggcgcatggcgtttccagtaagccggatctgcctgccagaggatctctctgtcattagtcttgtcatagatgccggtgagttcagcaccgtgatcggaaacggaaatcttaagaaagttgttttcaatcgttcgtgtcatgataaacctcctgtatgacagcattcgggtaatattacctcggaattgctgcatgtttttttctattttagcacatttttcagatgataacgagaaaaatacaatctgtgaaaaatataactggaaaatctgtcatatttcacaagagaaattgctgttttttggaagaataaccttgactaatggaggataaatctataaaataattatgtgcgtagaaaacatacattttttatgttttaaagaacaataattaggaggaaaatgtaaaatggcaaaatgggtttacatgtttacagaaggtaatgctactatgagaaatcttctgggcggcaaaggtgccaaccttgctgagatgacaaacctcggtcttcctgtaccgcagggcttcacaatcacaacagaggcctgcacacagtactacgaggatggcagatccatcaacgatgagatcatggctcagatcatggaagcaattaccaagatggaaggagttaccggtaagaaattcggtgacaaagaaaatcctctgcttgtatccgttcgttctggtgcgagagcatctatgccaggtatgatggacacaatcctcaaccttggtttaaatgaagaagttgttaacactcttgctgagaaatccggcaatgagcgttgggcttgggactgctacagaagattcatccagatgtactctgacgtagttatggaagttggtaagaaatacttcgaggagctcatcgatgagatgaaagctaagagaggtgttaagcaggacgttgagcttacagctgctgacctgcatgagcttgctgaccagttcaaagctgagtataaatctaaaatcggttctgatttcccaactgatccgaaggagcagctggtaggcgcaatcaaagccgtattccgttcctgggacaacccacgtgcgaacgtatatcgtcgtgacaacgatatcccatattcctggggtacagctgttaacgtacagatgatggcattcggtaacatgggtgatgactgtggtacaggtgttgccttcacacgtgaccctgctacaggtgctaacggtctgttcggtgagttccttaccaatgcacagggcgaggacgtagttgctggtgttcgtacacctatgcacatctccgagatggagcagaagttcccggaagcattcgtacagttcaaacaggtttgcgagactcttgagaaacattacagagacatgcaggatatggagtttactgtagagcatggtaaactgtatatgcttcagacacgtaatggtaagagaactgcacaggctgctcttaagatcgcttgtgacctcgttgatgagggaatgagaactgaggaagaggctgttgcaatgatcgatcctcgtaaccttgatacacttcttcatccgcagttcgatgcagctgctcttaaagctgctacaccgatgggtaaaggtcttggtgcttctccaggagctgcttgcggtaagatcgtattctctgcagaggacgctgttgagtgggctgcaagaggagagaaagttgttcttgttcgtcttgagacatccccagaggatatcacaggtatgaaagctgctcagggtatcctgacagttcgtggtggtatgacatctcacgcagctgtagttgctcgtggtatgggatcctgctgtgtatccggatgcggcgatatcgctatggatgaggagaacaagaaattcacacttgctggtaaagagttccatgaaggagatgcaatctctattgatggtacaacaggtaacatctatgacggacttatcccgactgtagatgctaagatcgctggtgagttcggacgtatcatgggatgggctgacaagtacagaacaatgaaagttcgtacaaacgctgatactcctgctgatgctaagaaagctcgtgagcttggtgcagagggaatcggtctttgccgtacagagcatatgttcttcgagggcaacagaatcgatgcattccgtgagatgatctgctctgagacagtagaggagagagaagcagcacttgctaagatccttccggagcagcagggagacttcgagaaactctatgaggcacttgaaggaaatcctgtaacaattcgtttccttgatccgccacttcatgagttcgttcctacagaggaagaggacatcaagaaactggctgatgctcagggcaagactgtagagcagatcaagacaatcatcgcttcccttcacgagttcaacccgatgatgggacatcgtggatgccgtcttgctgttacttatccagagattgctaagatgcagacaagcgctgttatccgcgcagctatcaacgttaagaagaatcatccggattggaacatcaaaccggagatcatgattccgcttgttggtgacatcaaagagcttaaatatgttaagaaattcgttgtagagacagcagatgctgagatcaaagcagcaggttctgaccttgagtacgaggttggtactatgatcgagatcccgagagcagctcttacagctgatgatatcgctaaagaggctgacttcttctgcttcggtacaaacgaccttacacagatgacatacggattctcccgtgatgatgctggtaagttccttaacgcatactatgatgctaagatcttcgagaacgatccatttgctaagcttgaccagacaggtgtcggcaaacttatgaagatggctatcgagcttggaaaaccggttaacccgaaacttcacgtaggtatctgcggtgagcacggtggagatccgtcttccgtagagttctgcaacgagatcggacttgactatgtatcctgctcaccgttccgtgtaccgatcgctcgtcttgcagcagcacaggcagcaatcgctaagaagaacgcataagtaagaatacatttcaggctgaagtttcagtctgagcatatataaagcttctggcagtctgtagaaatacagattgtcagaggctttttttctttatgatattttttgaagtattccgacggtttacgaaaaatgggattcatggtatcatgaaagaaacagggcagataaagccggaggataaggagaattttatgaatcaggaatcacagacacctcataagagacgtgtacgatataaaggaaaatatccgaagaaattcgaggagaaatataaagagcttcagcctgaaaagtataaggataccattgaacatgtgatcagcaagggaaacacaccggctggaatgcatatttccattatggtaaaagagatcattgattttttggagatcaggccgggacaggttggatttgatgctacacttggttacggtgggcatacaaaggccatgctggaatgtctgagaggtcagggacacatgtacgccacggatgtggacccggaagaatctgccaagacaagaaaacgtctggcagagcagggattcggagaagatatcctgacaattaaactccagaatttctgcaccattgatgagatcgcagaggaagttggaggctttgattttatccttgcggatcttggggtgtcttctatgcagatcgacaatcccaagagagggttttcctttaaggtggatggtcctctggatttaaggctgaaccaggaaaccgggatcagcgcagcacagcgtctggataccatttcaagagaagagcttgccggaatgctggatgagaattccgatgagccgtactgtgaggagatcgcgaaggccatcacagatgagatccgaagaggaaaccacatagataccactacgaagcttcgtgaagtcattgagaagacattgtctttccttcctgaaaaagagaggaaagacacggtgaaaaaaacatgccagagagttttccaggcactgcgtattgacgtgaaccgggaattcgaggttctctatgattttatggaaaaacttcccggagcgctgaagccaggcggccgtgtagcaatccttaccttccattccggagaggacaagctggtaaagaaagccttaaagcagggttataaagacggcatctattccgactattcaaaagatgtgatccgtccttccgcacaggaatgtgcacagaatgggcgcgccagatccacgaagatgcgctgggctgtgaaggcctgagtgaagagtgaaagagcagttctgatacaaatacagaaacagaaaaatcctggaatgcgttgacattcgggattttttttgctatgttatataagtttacatatgataaagctatggtttaaactgaataggagaaaggatatggatgtggaggaaaagaaggacatttttgataaactgatgcatcttccggtgctgaatatatttgaacctttttataagaaacataaggaagttctgatgtatctgttctttggagggctcacattttttctgaacattgcgttgtatgcatggctggataagggcctgggcatgaatgcgctgattgccaatgtgatctgctgggtggtctgcgtactgttccagtattttacaaacaggacatgggtattcgacgggcaggtggattccgccgccggatttttaaagcagatggcttcgtttttcggaggccggctctttacgctgattgtggaggaagcaatccttgcggtatttatcacctggcttggatttaacagcatggcagtgaaacttgttgctcaggtggttgtgatcgtattgaattatgtgatcagtaaattgattgtttttaaaaaataaaagatagttatatttgtggaaaaggagttggactgaaattgacaaaggacaagaccaatgatatgaccgtgggaaatccggtgagcctgatcatccgctttatgattcccatgtgtctcggaaatatttttcagcagttttataacattgcggattccattgttgcgggtcagttcctgggagtagatgcgctggctgcaatcggaagcaccggttcactgatgttttttgttaccggatggcttaacggactgagcagtggctttgccattctggtatcccagtggttcggggcgaagcaatatgataagatgcgtcattacgtagctatgtccatttatctggcagcagcctttgccattgtgatgaccattggctttgaggctttgaatgaaccgattctgcggctgatgaattcaccggaggatctgatgggatctgtgaagggatatatgggaattatttatgcaggcctgatcgtaacagcggcatataattcactggcagcgtttctccgtgcacttggagattcaaaatctccgctgtattttctgatcatttcggcagtgatcaatgtgttcctggatattctgtttattgtaaaaatcgggatgggagtggaaggctgtgcctatgctacggttatcgcgcaggcaatttccgcagtctgctgcctgatctatattatcaaaaagttcccgatcctgcatctgaagaaagaaaactttgaagtttcttttaccagcttccgttatctgctggcccttggtattcccatgggacttcagttttccatcacagcgataggaaccattattgtgcagggtgcggtaaatatttacggttctgtatatatggcaggattttccgctgcgggaaaaatacagaatatcattgcaacggtatttgtagcttttggtgcgacgatggcaacctatgtaggacagaaccggggcgccggaaagatggaccgtgtaaaagcaggaatgaaatatacccagatcatgatcctgatctggagtgtgatcactatgatcattatgttctttttcggaaagtacatgacttggttatttattgacaaatcccagacggatgttattaatgtttctgttacttattttcatacggtattctgggcatatccgttccttggaagtatcttcctctacagaaacggacttcagggactgggatatggcttggttcccatgctgggcggtgtgtttgaactggcggcaagaagtgcgatcgttatgtttgttgcaggaaaaacaagttttgcaggtgtatgtctggcagatcctgccgcatggatcgcagcgctgatccctctgatcccgtattatatttatgtgatgaaaaagtggagcaggggaaaaaaggaaactgctgcctgagtgggtataatacagaaaatgaaaagaataaatttaggcttgcaattatggaagatacagttataatgatattataactgcggaaaaaaccaggaaaccgggattccgggtaagattacagatccagaagggagaatatagattatggaaatcacaaaggaaacaacaatgggcgagatgcttgcatacgatgagaagatcgcatacattcttatgcaggaaggaatgcactgcatcggctgtccgtcttctatcggtgagtctcttgaggaggcatgtatggtacacggacttgatgtaaacgctgtactggcagacatccatcattatgaggaaaccaagaaacagaaataatcagcagtacaatttatattagaacgtacagattacggaccgcaaggggataacgactgtgcatgtctttttggcatgccgtcgttatccctttttttgtgagcagacgataaagagagtcttaaatatctgcttgatatggaggaaaaaagcatgtatgtgatgatcgataatttcgattcatttgtttataatctcaaggcatattttcaggagcttggaagagagatcctggtcagacgctgcgacgagatcaccctggaggagctggaagagctgaacccggaaggaatcatcctttctccgggaccgaagcgtccctgggatgcgaagctctgcgtagataccgtaaaaagatttcagggaaggattcctgttcttggtgtctgtctggggcatcaggtgattggccactgtgcgggagcagtagtggaaaagggcgtgtgtcccatgcacggaaaagtaacagagatccacaaccacggaacaggagtgtttgcaggcctgcctgagaaatacaaggtgacaagataccattccctgatcgtgcgggaagacagcattccggaggagtatcaggtggatgcgctttctgatgatggtgctgttatgggaatttcccataaagcattgcctatctatggtgtgcaattccatccggaagccgttcttacggaatttggacatgagcttcttgagaatttttgcaggatcgcggagaattttcagaaggaggagtaaaaatatgtacaaaaatcagcgaagaataaaagaactgactccatatatcccggcagtggacatttttcggatctacgagagagaacccggagcagcgtttctggattcctcccttgtcaatgagctgggacattattccgtgatcggaagatgtccgtatctgaagctggtaaaggacggagagaactttactatcaacggaaggccggaaacagaaacaacctttgaagactatatgcgggaatatttaaatacccatgaagacaaaaataacagcggacttcccatcgtatccggtgcagtaggatatttttcctatgattacggaagaaaacagatgggagtaccatccggagaaaaggatcttgtgactgttccggaggcagttctgacgttttatgactgttttatcatagaagactgtcaggaaaaaagaacctatcttgtgtcaaacggaatcagtgcagacgctgcagcagaaatcagagcgatggaaaaagcaatccgggaatttacagaggcggggaaacaggaaggatcggaaacaggggaaaaaaaggaatccggaaacaggatggtcacggaaaattctcaccgtgagaaattcaggatccaggttcatcccaactttgagaaagaagaatacaaacaggcagtagatcggatgatccgctatattatagagggcgatatctatattgccaatatgacgcagcagctgaccattgaaagcgaaaaaccacctctggatgttttttatgatcttcggaaaaataatccgtctcctttcggcggatatctggatttcggagattatcagatcgtctgtgcatctccggaacgttttctgaagatgaaagaccgtcatgtaaatacccgtcctataaagggaacaaggaaacgtggcgtaacatctgaggaagatgaaatgctccgtcgggagcttcaggattccggaaaagataagagtgaacttcttatgatcgtagacctggagcgaaatgatctgaaccgggtgtgtacaccgggaagcgtgaaggtaaccgagctttttacagtggaagcatacgctacggtttttcatctggtatcggatattgaaggaaaactggaagacggaaaaaatgttatggatcttctggaggctgcattccccggcggttctattaccggtgcgccgaaataccgtgccatggagatcattgacgagctggaacacggaaagagaaatctttatacaggctctatcggctacctgacactggacggaagctgtgatttcaacatcgtgatccgtacagctcttcataaaaacggaaaatatcaccttggcgttggcggcgggatcacagcagagtcagatctggaatttgagtatgaggagactctgcagaaggcgaaagcgatcctggatgcactgcagtagagaaacatacagaacggtaaaagtgaaaggctctgtggacagatcagagaatctgacagggacacttcataaggaggtcaaaggaaatgaacaacataaccttagacgaatgttttcagttcggtctgggagcatttgagaccatcggaatagaaaagggaacccccatacttctggaaaagcatctgaaaagactggaacgagcggcagatttcctgaagctgggtgatccggcagtgcgtgggatcacagccgggaggatcgaagaatttctggaagaacaaaaaaaacgcccggaggtgcagaaagaatttggtggactggaacactgtgcgctgaagcttatgcttacaaaggaaaatgtagtgtattctcttcgtgccaatcattatacgccggagaattatgaaaaaggctttatcatggatgtcagcaaggtaaaacgaaatgaaacatcacctcttgtatatcacaaaaccatgaattacggagattgtatcttggaaaaacgtaatgctacagcagcaggaatggatgaacggttgtttctgaatacaaagaaacagatatcggaagggacagtaagtaatgtattctttgtgcgaaatggcatgatctatacaccaaaagtcagctgcggacttctcccgggaatcctccgtgaatatctctgtgacacggaagaggtggaagaaacctatatctatgttcaggatcttaaatggtatgaggaatgctttgtcaccaattccctgatgggaatcatgccggtgcgtcagatcggaggaatccggtttgaggaagacaaagtgacaagggagctgatgagaagatatcggaagatggtcagagatactgcgaataagaaacaaatcagataaatgttattgcgaaactatcacattcaggaaaggtgatggaatttgaatgaaagtgaccaatacagtcagagataagcgtgcattaaccagggaaagctaaggttgatgcacgttttttgtgcaaactcaaccaaaaacgttcatgaattttgtgaagtaatttgattgactttgaatgaatttggaagtatactgagttcaacaaatgaaaaacaacaaaaagcggtcaaaaaccgcaggataaaagatatgggaggagaaaaaatgatctgcacagttacttttaatccgtctctggactatatcgtttccgtggaggattttaaactcggacttaccaaccgaacaagctctgagctgatgcttccgggcggaaagggaatcaacgtttccaccgtgctgatgaatcttggaatcgagaatacagcacttggtttcatggcaggattcgtcggagatgagattgtaagaaagcttgaggagatgggagtgagatctgattttatcaggatcccggaaggcgtttcaaggatcaacctgaagctgaaatctattgatggaactgagatcaacggaatgggaccggagatcagcgctgaaaaggttcaggagctgatgaagaagcttgacacactgaaagagggagatgtgctttttctggcaggaagtattccttcatctatgccggatgatatgtatgagaagatcatggcgagactggacggaaaaggcgtgatgatcgttgtggatgcaacgagagatcttcttgtaaatgtcctgaagtatcatccgttcctggtgaagcccaataaccatgagcttggagaaatcttcggcgtagagcttaagaaccgtcaggatgtgatcccttacggaaagaagctccaggaaaaaggagccagaaacgtgctgatctcaatggccggtgagggagctgtcctggtagcagaaaacggtcaggtgtttgagaaaccggcgccgaaaggaacactggtaaacggcgtaggagccggagattccatggtagcaggctttatggcaggctggatggaaaaacaggatcacgaatatgcattccatatgggaatttccgcaggaagtgcaagtgcattttctgaaaatcttgccacaagggaagaggttcaggcagtatatgaacaggtaacagaggggtaaagaagaaaggagaagggaagatgagaatcacagatctgcttgacaaacgaagcatatcactggatgctgcaccgaagacgaaatctgaagctctggacatggccgtagatcttatggtaaaaagtgaaaagatcagcgacagggaagcttatcggaaacaggtgtatttaagagaggaagaaagtacgacaggaatcggtgagggaatcgctattcctcatggaaaatgtgatgcggtaaagaaaccgggacttgctgccatggtagtaaaaaacggcgtggaatttgaggcactggatgatgagccggttacccttcttttcctgatcgcagcaccgaatacagaagataacattcatctggatgtactcagcaagctttccgtaatgctgatggatgataattttacagaatccttacgcaacgcaggttctgtagatgaatttatggagatcatcgacaaggccgatgaggagaaaaaagatattgatgaaagactggcagatacaggaagttccgaaggagccagagctaaactgctggcagttacttcttgccccacaggtattgcccacacctacatggcagcagagggactggaaaaagcagcgaaggcgaaagactgtttcattaaaatagagacacgaggctccggtggagcaaaaaatgtacttacggatcaagagatccgggaggcagactgcatcattgtagctgcagatgccaaggttcctatggatcgtttcgatggaaagaaagtcatcgaatgtcaggtttcggatggaatcagcaaagcgaaccagcttgttgaacgtgcgatttccggagatgttccggtatatcatgcagcagcaggcagtcagagctcttcctcaaatgcaaaagcaggcggcggagcaggccacaagatctatatgcagctgatgaacggggtatctcatatgcttccactggttgtaggcggtggtatcctgatcgctctagcattcctgatcgatggtttaagtgtagatttgagttcccttcctgcagaccagagagcaaactttggtaccatcacaccggtagcggctgttctgaaaaacattggtggaaccgcatttggtttcatgcttccgatcctggccggatttattgcaatggccatcggtgacagaccggcacttgcagttggacttgtgggcggtatgatcgcggcaaacggaaaatccggtttcctcggagcacttcttgcaggcttccttgcaggatatctgatccttggacttcgtaaggtttgtgataagcttccggaagcactggaaaaaatagcgcctgtactgatctatccggttgttggtgtccttcttatgggactctgtatgaccttcgttgtagagccgatcatgggcggtatcaatacaggattaaataatgccttgacaggcatgggaaattcaagtaaagtaattttagggttggttcttggtggtatgatggccattgatatgggcggcccgttcaacaaagcagcatatgtatttggtacagcagctattgcggcaggcaactatgacattatggcagcagttatggtgggaggtatgactcctccgtgtgccatcgcactcgcatccctgctgtttaaagacaaatttacaaaagaagagcgtgaggcaggaccgaccaactttattatgggacttgcatttatcacagaaggtgcgattccttttgcggcatctgacccggtccatgtacttccgtcctgtatcgtcggttccgcagcagctggagcgatctccatgttcttcaactgtacactgatggcaccacatggcggaatcttcgtattcccggttgtaggcaatgcaatgatgtatctggtcgcactggttgtgggaactctgatctcagctgtacttctcggggtactgaagaaaaaagttgcttaaattttttaaaattaaaatgaaaactggaggataaagaaatgaaagaattcaagtatgtagtaacagataacgaaggaatccatgcacgtccggccggagagcttgtgaagcttgtaaaaggtttcgagtccaagatcactatcgagaaggacggcaagactgtagagtgcagaaagcttcttgcacttatgggacttggcgtaaagaagggacatgaggttacctttacattcgatggtgcagatgaggatgcagcatacgaggcagtaagcaaattcatgcaggagaacctgtaatctcagaatgagtgaacagaaggcatcccggtccgatcgatcgggatgtcttttttgaaggaggaaaaggaatgctgacggagcagagatacgagatcatactcggccttctcagagaaaaaaacagtgttacggtaacagaactgaaagatatcctggatgcatcggaatctacggtccgcagagacatcacggcgctttacaaggcggggaagctgaccagggtttttggcggtgcggtggcactggaacatactgtcaatgcctatgagcctaccgtagcccagaaagttgagctgaatattgaagaaaaaaagaagatcgcagtctatgcggcagctctgatccgtccggaagattttgtgtatctggatgcgggaacgactaccggatatatgctggagcatctggaaggctccagggcgacttttgtcaccaatggtgtttcccatgccagggctctggctcagatgggagtccgtgtgctgctgatcggcggagaactgaagggatctacggaagctgtgatcggaagtcaggccatgcagatgctgaagaattatcattttacaaagggctttttcgggaccaacgggatgactcagagagaaggctttaccacgccggaatccaatgaggcgctggtaaagcgaacagctatggagcagtgtctggaaaagtacgtggtgtctgacagctccaaattcggacagatcagtgcggtgacattcttttcatttgacggagcggtgatcctgacggaaagctgttccaaagaatataaagattgcagaaatatacagatcgtatcatagaaagatcacaaataaaaaaccggtttggaagaaaaaattcttcgtaaaccggttttttgtttggtgaggatctgtttcaggcttccctggagatcatggcttccagatcttctacggaaatgtcttttttgtgcatcagcttgagcagacgtttcagttcggcagcttcctttgcctttttttcagctttgcggatttcatccagctgagctgccagtgcagttttttcatcctccagcgctgctatcttttcggtgcaggcagcaatcttggaatctactttggaaattttctcattgagtacttctatctttgtacgtctctgtgccatatgaaacctcctgataaaaatattacttcttatacactatacaatagcataaacgacgatgaaatacaattgtgaattgatgtgcaatatgttatcatgaatgtatataatatttcagaaacgcaggaaaatactatggataaagataagggtgtatttatgactgcccgggaagtaaatatggaaatagaaatgctgaagacggtttttgacattgtaagactggtggatgttagccgtacagctccggtaaatattggctcagacgattgctcttatgaagcagaacataaatgctttgcagtgtggaataaaggcagaagatgtgagaactgtatttctgccaaagtttttgcccgtaaaaacaaaatgacgaaatttgagttcgtcaatgatgacatttatcaggtaatcgccaaatatgtggttatagacgggacacctcttgtcatggaaatggtctttaaaatgacggataagatctttctgggagcttatggaagcggatctctgatcgataagatcagcagattcaaccgggaattatatgaagatccgctgactggtgccagaaaccggagatattttgaggaacagctgaaatccctggataagatgggggctatagctatgatcgacgtggacaattttaaacagattaatgacagctatggccatgtagctggagatgcggcgctttgtaccattgtcagaacgatttttgagcatgtgcgggcagatgacgtggtattgcgttatggaggagacgaatttcttctgatgtttgaagaaatcccggaaaaggtatttcagcagaagctggaagatatccgggaagagatcgcaatggcagatgtgccggaatacaaagaaatccggctttccatgagcgtgggaggtgtatatggaagctgtaaggtcagagatggagtgatggaagcggacaggcttctctatcaggccaagcggcaaaaaaactgtgttgcctacaagaggatctgacggaaatgacatgacagtcattgaaagcagaattatgtaacaggcgcatgaggtgtatatctggcaagtgaaagggagaatagggatatgaagataatcgcaaggatcagaagtgattttccgacaaaattcggaatcccgcgtcagagcggtcgagtggaagaactgacagcctgtattgtttttgaaccggaataccgggtacgggaagcggtaaaaggactggaagatttttcgcatatctggctgctgtgggagttttcacagtcgatccgtgagaactggtcccctacagtacgtccgccacgcctgggcggaaatgaaaggatgggcgtatttgccaccagatcgcccttccgtcccaatcctgtaggcttatcctgtgtgaagcttgaaaaaatcgatctggaaagcaaagaagctcctgtactgatcgtatccggtgcggacctgatggacggaacccccatctatgatatcaagccatatctgcctgtggcagactgccatccggaagcgctgggcggctttgcgacgaaggtggagcagcattttctgcaggtagagatcccggaagaatggaaggcaaggattccggaggataagcttactgcgttggaaggcgtgctcagagaggatccgaggcctgcctaccagaaagatccggagaggatatacggaatgccttttgcaggaatggatgttcattttcaggtaaaaaacggcatacttacagtatgtgagatcacaggatataaaaaatcagacagaatttaaaattacctttgacaaactttttgtgagatggtattataataaatgagttagcaagtgctaactcaatattttaaaagtaaagttagtttaaaataaccttgaaacagtcatataaaagttcagagatcaaaggagagtgaattatgagcgttgtaattgtaggcggtaatgaaagaatggtatgtcagtatgaggatatctgcaaaggcttcggatgcaaggcgaaagtttttgccaaggaaaaaggagccatgaagaaaaagatcggggtgccggatctgatgatcctgttcaccagtaccgtttcccacaaaatggtaaactgcgcagtagaagaagcaaagaaaaaatccattccggtatgccgctgtcacacaagcagcgctgcagctctcgagaacattctgaagcagtactgtgcataagaaacagatcaggagatacttttctcttgtataatttgactttttttgcagaaatgttacggaaaggcttgcaaaattacaaattattcaataaaatagccgtaggtttctgtggtaaagcgttgcagtgaatggtgaaaaggcggcgctggaagtcgaaattacaggtgagaggtgttatcatgaaaaaagttgtaaaattcggtggaagttctcttgcaaatgcggagcagttccagaaagtgggcgatatcatccgcagtgatgagagccgccgttatgtagttccgtcagctccgggaaagagatttgacgaggatatcaaagtgacggatatgctttatggatgttatgacgcagcatccaaaggtgaggatatcactgagaagatcaatgcgatcaaggcgcgatattatgagatcattaagggactcggactgagcctttctcttgaggaggagttcaagaagatcgatgaggatttccgtgcacaggcaggaatccagtatgcggcatccagaggagagttcctcaatggtaagatcatggctgcatatcttggatatgattttgtggatgcagcttctgtgatccgttttgataaagctggtaatctggaagcggaggagaccaataaactcctttccaaaaaactcagcaaatcccagcatgcggttattccgggattttacggcgcatgtgcagatggcacagtaaagacattttccagaggtggttctgatgtgacaggttccctggttgcaaaggctatccatgcagatagttatgagaactggacggacgtttccggttttcttgtaacagatccgcgtatcgttcacaatccggagcctatcgaggcgatcacatacagagagcttcgtgagctttcctacatgggagctactgttcttcatgaggatgccattttcccggttcgtaaagagggaattccgatcaatatccgtaacacaaacagcccggaggataaaggtactctgatcgtagagagcacctgtaagaagccgaaatttactattaccggtatcgccggaaagaaaggcttctgctctattaatatcgagaaatccatgatgaacagtgagatcgggttcggacgcaaggtacttcaggtatttgaagatcaggggatcagctttgagcatgtaccatccggaatcgataccatgactgtatatgttcatcaggacgaatttgaggagaaagagcagcaggttatcgcaggtatccaccgtctggtgcagcctgattttgtggagatggaatcggaccttgcactgatcgcagttgttggtcgtggaatgaaatcccagagaggcactgcaggaaggatcttctctgctcttgcccatgcaaatgtaaacgtaaaaatgatcgaccagggttccagtgagctgaatatcatcatcggtgtagagaatcgtgatttcgaaaaagcagtcagagcaatctatgatatttttgttctgacacggatataaacaaaatctggaaacggattttgtttatgagaaagtagcgaagcggattccgaatatccgatttatataaatccggaaacggattttgtttatgagaaagtagcgaagcggatttcgaatatccgatttatttaaaaccgccgcagtacgtgtaacataccgtcctgcggcggatttttatggaaaaaatccaagatttatctaaaaataatacaatcaaattcaacaggatttccaaaggaaagacaaagatattgtacattgtgtcgaaaaaagtttgatatgaaataaacagtattgacaaaaacttaacttttgtgtaaaactgaaatatgaaaaaatcagaaaggcaggcggtcagctatggagaaacagatcaaactggatgaaaaaagtgcacaggagtttgtcagtgcagccagcagatgtaattttgatattgatgtattttataaccgtattatcattgatgcaaagtcgatcctcggacttttgagtctggatctgacaaagactctgacagtaaagtgttacggagaagatgaggattttaaccgtgttctttccaagtatgcagcaggttgagaaatatgaataaagaaaaacggtgataaaagggcgcagttcatgagaaaaaaagcagaacatgcgtcctttttattatgggaagctttcggatcatattttatggtataatcctggtatagcatggaaaaagaatagctgtcggactggaattccggcagctgccgggagtgaaaatatggaaaaaccaagagtgcggatttctgtcagaaatcttgtggaatttatactgaggagcggagatctggataacagcagtgggacatccggagataaggaagccatgttaaaaggcggaaggcttcaccgcaagatacagcggagtatgaagggcgattatcaggcagaggtttctctgaaaaaagaaagtgaatacgacgatgtggtcattcaggtcgagggccgtgcagatgggatctttacagaggacggagccgtttatattgatgagatcaagggtacttacggaaatgtccaggcaatggacatgccaatacctgtccaccgtgcccaggccatgtgttacggaatgatctggggagaaaaagaagggatttctgaaatccacattcagatgacctacgctcatcttgagacggaagaaaccaggagatttcgtgaggatttttccatagaggagcttaaaggctggtatcagaagcttctggatgcctaccacaaatggatcgcatattctcttaactggaaaaaagagagaaatgcatccatgaaggatctgcagtttccgtttccatacagagaagggcagcgggatattgttagtggtgtgtaccatacggtttccagcgggaagaccttatttgttcaggcgcctaccggtgtgggaaaaaccatgtctgccatttttccgtccgtgcgcgccatcggtgagggaaaaggtgaaacacttttttatcttaccgcaaaaaccatcacaggaactgtggcgcaggaggcatttcacatcctgcgggaaaaaggtctgaaattcaaggtaacggcgatcacggcaaaggaaaagctgtgttttcaggatactccggaatgtacaccggagaaatgtccttatgcaaaggggcattttgaccgggtaaatgatgcggtttatgagctctggaccactgaagaggtatattccagagaagtgatccgtgctcatgcagaaaaatggcaggtgtgcccttttgaaatgtgtctggatctttcaatctgggtagacgggatcatctgtgattataattacgtgtttgatcccaatgttcatctgaaacgttttttcggggaaaatatttccggggaccatatttttctgatcgatgaggcccataatctggtagaacgtggcagagagatgtacagtgccggtatttcccgtcagagtctggtagcacttcgaaagaagataagaaagaggttttcaaaactggccagaacactggataaagcaaatcgccagatgatggaactggaagagaatcttgcggaaacaggaaaagggtatcaggtgctgcccaatcccggagtactgccgatcacatttcttacgatatcaggtgaactggaagaaatactggaggaaaaagaactggaagaagaactacgcagggaaatactggaattttattttatagtgcgtgattttttaaatgtttcagagctggtagatgaaaattatgtagtatataccgaaaacagcgcagaagaaggatttcgtctgaggctgttctgtgtgaacccgtcagaaaatctgggagaatacctgaaaaaagggaaaagtgctattttcttttcagctacaatgtttcccatgctctattaccgggagcttttgacaacagaccgtgatgcctatgggatttatgtgcagtctcctttcccaaaagaaaaccgcaggattcttatcggcagcgacgtaagcagccggtatacccggagaaatcgtgcagaataccggaagatcgccggatatattgccagatgtgtctggcagaggcagggaaattatatggtgttttttccgtcgtatcgtcttatggaagacgtactgcaggtttatgaggaagaattttccgtagactgggtgcgttgcgtgtgtcagacgccggatatgacagaacaggaacgggaaggatttttggaggaatttcaggaacgggaaggtaccctggtagggttctgtgtccttggagggattttttctgagggtgttgatctgacaggggaaagtctgatcggggcagtgatcgtaggaaccggacttccccagatcggcagtcagcgtgagatcctgaaagagtattacgataaaaagaatcactgtggttttgattatgcatatcgctatccgggtatgaacaaggtgcttcaggccgccgggcgcgtgatccgcacaaaagaggataaaggcgtgatattgcttttggatgaccgcttctgggatcgggattaccaggaaatctttcccagggaatggcaggaccgtacaggctgcaggctggatacggtagaaggtgcagtggagacgttctggaagaggtttacttgacagaacggagaaatccgatatacttatagagtctttatctggaaaatcactggaggaatgtgtggatgccggatcaggacaagaaactgtaaaataggatcataagaaaagtgaaagaagtatatgagacgaaaaaaaatatataaagcattggcattttgtctgagcacagtgatgctcgcacagccggtttttgcgacaacagtgcagcagacagcacagggaagccttggttctgttacggaggagtcccagatacttccaattcccggtgaaaacgggaaatatattctgaaaagcaatggcttttactgcctgaatgaagatggaaccaaagaaaatactccggcagtgtattattttgatcattttgagatcgacggaacggtttttgatggatattattatcacgacgaaagcggtaaatttacagcgggaaactcgcatatggtccagatcaccgatctgaaggctccggcaaaagacggcagcggtgaggaagtttcttttgacggctgttatatggtaaacaatctgggaaaactcagcgcctctccacaggtacgttatatggatgagctggtggtggacaaaacaacatacaacgggctgtattattttgatgaatatggaaaaatggtcacagatccaggtatccattatctggaaatgaatgctgcaggacagatgtttgacggatattattattttggcggagaaaacggcgttctgctccaggaagagggagagactccggagggattttccgtggataaatctggaaaagtcgagacgaaagatctgggaatggatggccttgagaaacggcttgcggatcttcttggaacctatgagggtacatggagcgtttatgtaaaggatctgaccagtgatcaggagtttgaacagaacagtcagtcactgtactcagccagtctgatcaaagtgtttgtcatggcccagacctatgccaacatggatgcagtccttcagaacgaagcggcaaaaatgaaaaaagatgttacagatccgtccgtatccacaaaggtcaatgaccttctctggaatatgatcacagtcagtgacaatgaatcttttaatgagctggtacgtctgcagacagcatcgggtgtttttaaggacggagcacaggctgtaaatggatttcttgcggaacagaaatttgcagatacttccgtacagcacatcttaagcccgtcctcttcaaaggacgtcggcctcggtggcaggaacactacttccgtaaaagactgcgcagagcttctttcccggatctataaaggagaatgtgtatcgaaagaagcttcggaggctatgctgaacctgcttctgaaccagcaggttactactaaaatccccagcgggatatctgtgtccgtggaaattgcaaataagactggagaaacggatacggaccagcatgatatcgccattgtatatggagaaaagactacatatatcctctgtgtgatgtcagaagactgtaaacctggggacgcagtttcgcatatccgggatatttccggtattgtttataattatctgaatatggaccttgaccaggggtgatctgtgagttagaataaaaaacagctgagcaagatcctgatggatatttccgccagagaagtatccgaaatgttcatgaaaggggaattctattatgaagacagtacatacagacaaagcacctgcagcaatcggaccatactcccaggcaatcatccatggagatacgctttacacatccggtcagatcccagtggatccggcaactggagaggtagttggcacaaccatcgaggagcaggctgaccgtgttatgaagaatctcggagcagttctggaagctgccggttccagctatgagaatgcgatcaagacagtatgcttccttgcagatatgaacgattttgcggcatttaatgaagtatatgccaaatatttcgtaaataaacctgcacgttcctgtgttgcagtcaagacactgccaaagaacgttctctgtgaggtagaagtgatcgcagcgatcggatgatctgataaaaaatccctgttgtctgatttcagtcagacagcggggatttcttttcgtggtgataaagtatttttctctgttttggagcaatctcttttttgtgttttcaggcgttaaaacggtaatgttttttcttgtgtaaagtagagcgctgtagtataataaaaccagttttttaggatacgtataaaagcttaataaggatgatcggcaaaccagatgaaagtctgggacgcaaagctatagggcctgtaaaatggcagccagttgcatgaaatgaggtgcactgtctgtgagacggtgctttttttatccaatgcgttttataaaccatagtataatataaatatgaacacaacatataaatcaaacaacaatgtcgtctattcctgtaaataccatgtagtatggtgtccaaagtatagacgaaaagtattaattaatggtgtggacgtccggctgaaggagctgctcacagagtatgctgcaaatctttctgtagacattctggaaatggagatcatgccagaccatgttcatatgcttttggaagtagatcctcagtttggcatccacaaagctgtaaagtcatttaaaggctatacgtccagaattttaagacaggaatttccctatcttaaaacgaaaatgccgactctctggacaaacagctattttgtatcgacggtgggcggtgctccgctggaaacagtaaaacagtatattgaaaaccagaaaacatcgcagagacaaaaggataagatgggataatgcaaaaaggaattaaatttaggatctacccgaacagagaacagaaaaacttcatccatcagaccctgggatgttgccggttcatctacaatcggggacttgccatgcgtaaggaaggctatgaaaatggggaaaagatcggctattcccagacttccgccatgctgactgaactgaaaaagcaagaggagtttgcctttctgaaagcagcagattccattgcattacagcagtctttgcgggatctcgaccggggatttgtgaatttctttgagaaacgggcttcctatccaaccttcaaaagtaaacataaccggttccagtcatacagaacggtaaatcaaaaagataatattcgtattgtgggaagatatatcaaacttccgaaacttggatttgttaaaatacggcagtcgatggaagtggaaaagattaatcacgtgatcattgagcacacaccggctggaaaatattttgcggttttaaatgttgattttgaaccggaaccacgctcaaatgctggcggaacgatagggattgatgtcggaatcaaagcgttctactccgacagtaatggaaatacggtatcaaatcccagatatctggaacgctcaatgcgaaaactcataagagaacagcgcaggctttcccgaaaacaaaaagattcccataaccgcgagaagcagcggatcagggtggcaagagtgtatgagaaagtaaccaatcagcggaatgatttcctgcagaaacagtcaacgatgctggtgcgtgaaaaccaaaccatctgtattgaagatctgaatgttaaggggatgatccggaatcataaactgtcaaaatcgatagcgagtgtttcctgggcaaaattttttgaaatgctggaatataaagctggctggtatggaaatgaaattcacagagtaccaacgatgtatccgagcagtcagacctgcagctgttgtggctacagaaatccacggataaaaaatctgggcattcgtatctgggagtgtcccaaatgccatgcggttcatgaccgggatacgaatgcaagtatcaatattctgaaaaaaggactgcagatgcagtctgcataaagataaaaactgtaccgtagggcatacgggaacagtataaatatagcttgtggacactgtgcaagacattgcagtaccgtaaggtgtttgccaatgcagtagtgggagaagcaagaatccccctgctttagccgtggggagtgtcaagatgttattcggctatgagcaagtagcgaagcggattgcgaatatccgtcttatggatattatgatgccggtcatgaatggttatgaagctacaaagatgatcaggtctctggacagagaggatgcaaaagaaataccgatcattgcaatgacagcaaatgcgttcacggaggacagaataagagcaaaagaagcagggatggatgaacatattgctaagcctgttgatgtggggttactgataaaagtaattcataaattggtgaaatataatggatatggcagtgacaaataagcagtgaaatatagataggaggacaaaatcatgacaatacaggaatgctatgaagcgatcggaggaaactataaagatgtcttgggacgtcttcaaaacgaagcactgattcggagatttacattaaagttccttgaagaccagagttatctacagttaaaacaggcattggaaaataaaaattatgaagatgctttccgcagtgcacacacactgaaaggggtttgtcagaatctttcttttgaccgtctgtatgaggttagtaatgagttaacagaacttttgagagatagaaccggagcgcagcctgggatatcgaaggcaatggaaaaagtaacagaagtatatgagaggatgattgaagaaataaagaagggactgtcgaattaagtgatgcgacacgacgttcgatctttgaccaggtgcttggaacatcataaacccattggataaaggaaataaaaaaatatggataaaagacaaaagatcctgattgtagacgattcagaatttaacagggatatgttgaaggagatcctcggagaaacttataattacctggaagcggaaaatggaaatcaggcaattcagatgataggagaaaatataggaattgatctgatgcttttagatatcaatatgccacagatgaatggttttgaagtcttggaaataatgaaaagaagccagtgtattgctgaaactcctgtaattatgatatcttcagaagatgccgttgatacgatgcataaggcatatgagctgggaatcacggattatatcacacgaccgtttgattctgtgattgtaaagaaaagagttcagaataccctgggactctatatgaagcaaaagcatctgatcaatgtggtttatgatcaggtttacgaaaaagaagaaactaataatattatgatcaggattctgagtaatgtattgggatcacgtaacagtgagagtagagaacacatcctgcatattaaaacagcaacggaaatgatgctgagacaactggtaaaaataacagatgcttatcctatgacagaggcagatatttctttgatcacaacagcatcttctcttcatgatatcggtaagatccgtattccgaaagaaatcctgaacaaacctggcagacttaccgatgaagaattcaggattatgaaaactcatagtgaacttggtgcagatatgatccaggatatgcatttcccaaaagacaattcattggtacgtgcttcatgggaaatctgcagatggcatcatgaaagatgggatggaaaaggttatccggatggactgaaaggagaagaaataccaatctccgcacaggtggtgtcgattgttgatgtttatgacgcacttacaagtgaaagatgttataagaaagcatttgatcatgacacagcgatccagatgatcctggatgggcaatgcggacaatttaaccccatcctccttaagtgcctgaaagaactgagtcttcagctttcgaaaatgcttgataaagagatggctgacaatagctattactatgaagtacagagactttcaaatgaaatactcagcgacagatctttaccgaaccaaaattattcacagagtattctcagggtcatgaaggaaaaggttgattttttcaaagcgaacagcggcatgggttcaattgattacaatacaagttccggtcagctgactatattaaacggaaaacagcagatattatatcagagaaataatccggattttaatctgttcaaagaattcggagtaaatgaagaagatgttcagcatattcaggttttattacatcagacatctgtacaaaataaagaaatctctgtgcagataaaagcaagggtggagaatgtccgccagatgtataaactgaaattgcatacattgtggtcgcctttaaagaaggatggatacattgggatcgttggatattttgatattgtaaaatagaaaaatgcaaaggaagctcagaaggaggatcctaatgaaaaagaaaatccggcactggctggaattactattcttgctatgactgccaatgcctttgatgaggatagaaagaaagcactgaaatgtggtatggatgggttcttgtccaaaccaattgtcatagaggaattgatcagcatcctgcagaagaacctggattaggtgtccggagtattagaaaaaccgcacaaataaaggaaataaaaatatggataaaagtaggaaaaaatcaaccgtactatgtgcaggtatatttgtgtttctgggaatatggatggtattgacagtaccttgccgggctgctgagacgaacaacgatgaaaagcagtcacagatcatccgtgtcggctcatttgaggatacttttaattatgtcgataaaaacggtgtaagacgaggatatggatacgaacttatgcaggctttggcaggttataccggatggaaatttgagtatgtgaaatgtgactggtctgactgttttgataaacttgaaaatggtgagatcgatatcatgggtgatatctcttacaccgatgaacgtgcacaaaagatgcttttcccggatgaaccgatgggggaggaaaaatatatcctttatgctgatttatcggatacggatattggaatgtctgatttcaagtctctggatgggaaacgtgtaggtgtgctcatggatacagaacctgagatcatgctgacagaatgggaaaataagaatggcatacatacagaacatgtaaatgtgaataatgatgatgatgtcgaaaagaaattagcaaatcatgagatcgactgttttgtatctctggaggaatcgatctggtctgaacagggaatatcatccgttaccacgattggcaaatcaggcatatattttgcaataaataaagaacgcagcgatatcaagacggagctggactatgctatgcgtcaactggaacaggatagtcccttttttaaggcagatctgtataagaagtattttacacttgattatattcagattcttacaggtaaagaaaaggtctgggtggaagagcatggaggtatccagataggatttttgaacaatgatccggcaatcttttccatggatgaagagactggaaaaattaccggtatgctggcggaatatatctcctatgccaaagattgtctgggaaatcagacactggaatttaatatacatgcatatgatgattatgatgaaatgattcaggcgctgcagaatcgtgagattgacatgattttttatgccggcaggaatccatattttgcagaacaaaacggatatgcacttacaaacacagcctggacttacagtttgatggcggtaactgatgaggaaaaatttgatgagaataaggtgtatactgtagctgtgccaaaggaaaaatatgccttaaaacagcatattgcattcagttatcctgaatggaagcttgtagattgtgattcgcttgacaatgcagcagatatggtcatccaagaaaaagcagactgtttcctcatgggagcaagccaggcgctgatatatgataacagtcaaaatttcaagagtgttccacttacaaaaacaatggaggcatgctttactgtaagagagggagagggaagccttttatcaatactgaataaaactataaaggccatgccgtctgacatgcttacaagtgcacttgctatctatgacagtactgcagataaagtaacattttctgatttcataaaagacaatctgcttgtttttttggctacggtaggatttttggcactcagcatcattggtattatcctcgtacttttgcggaaggcaaggaaagcagaagctgtcgcaaagcttgcggcaaaggatacaaaaaaactcaatgacaaactggaaatcgctttgaaaaaagcagaggatgccagtctggcaaagactcgttttcttaacaatatgtcacatgacatccgtactcctatgaatgcaattctgggttatgcacagcttatggaggaagaactaaaagaaaaggatctgcctgaaacttcagatcatctggaaaaattgcagcagtctggaaatcttcttctgtcaatcataaataatgtacttgatatggctcggattgagagcggaaagatggaaattgatgagaactatggccggattgaagatatccggcagactttatttgaaatatttggtgatgaagcaaagaaaaagaatattgcacttcattacacaataaatgtagagcatgaacatatactgacagatactaccaaggtaaaagaaatatttgtcaatatcctgagcaatgccataaaatataccctatccggtggttctgttatgataaacatagacgaattagtatgtgatgagtccgggtacatgatggtaaggaccagggtgagcgataccggaatcggtatgagccaggattatctgacaaagattttcgatgcattcacgcgtgagcgaaacactacaaagagcaaaatcacaggaagcggattgggaatgtcaatcgtaaagagatatgttgatctgctcggcggaacaatagatgtagagagtgagcctggaaagggcagcacctttactgtaacattaaaacacaggatagcggatgaaagctattatgtaaaaaaacatgatgaaggctctggaacagccagtaaaatccttgaaggcaagaatatccttttggcagaggacaatgatctgaatgcagagattgcagaagcaatacttgagcgtgccggccttaaaacagaacgtgtggaggatggcattcagtgtgtaaataagataacaaaaatgccggtgggaacatatgatatgatcctcatggatatccagatgccccgaatggacggttataaagcaacacaggcaatcaggcacttaccggataaggataaggcatgcataccgatcgttgcaatgacggcaaatgcatttgaagaagataagcgggatgctgttgcagctggaatgaatggtcatattgcaaagccgatccagattgataaactgctgtcgatgttagcggaagttttaaggcagtaagaaaactaataatttcgtgttatactgaatggagtggtcattctttctgtattgaaaaaacaggaaaacttacagactgggaaggacaacagcatgaacgcaaacagactgcgttcatgagcaagtagcgaaagcggattgcgaatgtccgctttactggatgataaagaggaaatgaatgaacagaaagatagaaaaacagataagaaaaaagagtaagaataatagagtatgtttgagcatttttgcatttgtcatgctgctttttgtaccgttttttgtttatgcgtcggaaacaaaaagtgatgggaatacaactcaggtaatagaggaagaaaataaaaccgtgagagttggctatttcccatatgccaattttcaagaaggcggctatggggaacacaagcagggagcaggctatgagtatctccagaagatttcgtatataactggctggaagtatgaatatgtctatggctcatttaaagagtgtctggatatgttggcagatggagaaatagatatacttggaaatgtcagttacacaccggaaagagcagaatttatagattactcaacctatgccgcaggaacagaaagatattggatctataccagggaagatcatacagatcttacggatggtgatccaaagcagatgaatggctgtcgtattggtgtagcagatggaagctatcagaaagaacttctggaaaaatggctggacagcaatcagatccaggcagaggtggttgtttgtaaaggctatgatgaaatgatagaaaaactggatgcagatgaactggatgcacttgtgatcccagtgctgtctgtcaacagcgattttattgccattgccaatatcggtgcaagtgactgttatttcggtgtatcaaaatccagaccagatctgttaaaggaattaaattctgccatggaagaaatcaacaatacagaaacggactacagcagcaagctgtatgcccgttatgaaggaaaagcggtcataaactatgcactcaacaaggaagaaaaacaatggctggatgcacatgaaaatacgatccgcgtgggatatctaaaggataatcttcctttttgtggtgaagaaaatgggaaactcacaggaattcttggaactgttctggatactgttcaggaaaaatataaaattacgatcaaggcagttccatgttccacgggagtagagatgaatgaggcattgcaatctggcaaaatagatattgccggtcctatcattcaggatttttatacacaggaacagtttcaagtggttttgacggatgcaatctttgatattacgccggttgttatttacaagggaaaagaatatagcagcagtctctctacggtcgcagtgacagagacctcactgtattctggattgatggtgtcccttctttttccagatgcagaaatcaaacaatatgatacacaggaagaatgcctggaggctgtagcaaatggaaaagtgggagcaactgtcgttccatcctcaaagatcaatattcttaatgaaagtccactgacccaaagtctgtcatttgcagagatggcaaaacggcaggaattaggaatgttcacgacgagagaaaacagaagagcagctaccattatcaataaagcaattgagcagtcatccaatgttttaaatggtgttgtccttgcacagaattctgtttcagaaaaggaaatgaccttgaaggatatccttgctgagcatgcaggcttagttatcggagtttcgtttgtgattatttttgtactgcttcttctggtttattctctttccgtgagtagaaaaaaacagatggaagccctgaaagaagcacagaatgcaaatgcggcgaatattgcaaaaacgacattcctgaaccatatgtctcatgatctcaggacaccaatgaatgcaattgttggatttacagatattgccatgaagaggaaaccggacaaagaggtggagaattgtctgaaaaagatcaggcagagttcagaatatctgatgacactgatcaacgatgtgttggatatcagccgcattgaaagtggtaaactggaatataaaccggtaccgacagatctcagggatatgataaatactgttttgtcgatcgcaaagggatatatggaaaatcgtgaccttaatttgtatgtttcaagagaagaactaaaaactccttatgtgatggcagatgaactcagaatcagggaagtattgctcaatattatcagtaatgcagtcaaatttacaaaagacggaggtaccatttcattcgttgcagaaaacgctccgggtaatgatgagaatcatataattgtacgctatcgtatatcagataccggaattggtatgagtgaggagttccagaccagaatatttgatgagttcagtcaggaaaatggtggggcaagaaccagctataagggagccggactgggaatggccattgccaaacagtatgtagatcttatgggtggaaaaattgaggtcagcagcagaaagggtattggctcaacatttacggtagaaattcccctgcttatagcagaacagatactgactgaaaaggaagaaaagttaaggaaagatatggatttacatggtctgcatgtccttttggcagaggacaatgatttaaatgcagagatagcagcagctttgctggaagaacaagggatgatcgtaactaggactgccgatggaaaatctgctttggcacaattttgcaatacagcttcggggacctttgatctgattttgatggatatcatgatgccggaaatgaatggctatgaaacgacaaaagctatcagaaatctgtcggagcgtccagacggaaaggagatccctattattgcaatgacagcaaatgcatttgcagaggatgtacaggctgctttgcatgccggaatggatgaccatgtggcgaagccggttgatatgaggattttaatatctgtcatcacaaaatatatagaacggtaatgtcaatgctgcgtggatttcggaagtgggagaacagttcgatatatatatcggctgttcttttttttatttttggacgttaaaacggtaatgtttttcttgtatatagtagagcactatagtataataaaaccagtttttttgtatacgtgtaaaagctataataaggaaatcggcaaaccagatgaaagtctgggacgcaaagctacagggcctgtaaaatggcagccagttgcataaaatgaggtgcactgtctggctggcagtgctttttttgaggaatgatttatcaacaggagatgatcttcccgatatttgtacacagacagtttatgatccaaacatcaatgacatgagtggattgataagctgctgttgatgttagcggaagttataaagcagcaagaaaactgctgcaactgtcattccatcttcaaagattaatattcttaatgaaagttcactgaccaaaagtctgtcatttgatttcctgtaggaaagtaaatgaatattatttaaggtttgggataaattgtgaaatgcagacaaacaagaaaagtaaaaatataataggtattatacagagtttccttatattgatattagtagttcttattatttttatgatgattcagattagtaggctgcaggggacagcacgcgtaataaattatgcaggtctggtacgtggagctacacagcgtgaagtaaaattagaaattacaggaaaccaaaatgaagaattaattaaatatttggatgatattcttcttggattgagatatcaggatggacattatgatctggtaaaactcaatgacgaagaataccaggaaaaattgcaaatccagagtgattactgggataaattgaaaacagaaattgaagcagcaagaaacaagggatacgaaaatacagacattgttaatatgagtgaaatatatttttcgatggcagatgaaactgtctcttccgcagaaagctattcagaaaagatcgctgtaaagattcgtactatagagcttttgtcggcacttgatatgttgagtctggtgatattggttattatgcagactctaagggcaatgcagatggcaatgcaaaacagactgctggaacagaaagcattcatagatgcccatactgggctgccaaataaaaatgcctgtaatgatcttcttaataaaaaagatataattacagatcctacagcttgcataatgtttgatttaaataatttaaaaactgtaaatgatacaatgggacattccgcaggagatcagttaataataaatttcgcaaagcttttgcgcagtgttattccagaaaaggattttgttggaagatatggcggagatgagtttatagcagtcatttatcatacaagcgaggcgaaaattaaggaaatattaaaatccttgaacagagaaaaagacagattaaatagttatgaaaatcaaataccaatcgactatgcatgcggatgggcattatcctccgatgatatgtcgtgtacaatgcagatgttattggatgctgcagatgcttatatgtataaaaataaacagatatgcaagaaatataattagctttcagctcagagtagataaaagataatagacgcgatcagacgaaatattgttttgcgtagaaacactggaaatccttgaaaacaaaggattcttggtataagatgaaacaagtcaaagcacgtcattgcgtaataaaaaagaaagcaatgtatttatactgtgaagtctggaaagtgttgattttaaagcatttctggatgtgtgggatgctttgaaaatatgattttgtgacaattttgtgacaaacggcggaaaaatcacggatttacaaagacgaagcatattgatttcatgatcggcatatgctataatgccagtaggcaaaaagatatgacgatgttccatgtgaacaaagaacgaacccccgtatgtaccaccaatacatgcgagggttcttctctttttatttcagtggttgagcatccactaggctattcgttgtccttgttatgactgtctaaccatttgcaaatgagatggcaagtcacacctgccgcaacagccaccaaaaaagatatgactatttccatgtgttcacctccccccgttgccgggtctcggttggacaacgcagtcagtataacacaacttagaacagaatggaacatataaaaatacccggtgcaaattaatgtaccgggtgtttctttggcctttttgtcaattcttgatgtttttgttttaaccattcttcatactgcttttgagtttgaatagaagagttatagtcattagggcaaggagaaactttctttcccttaatcaaatctctgtaatagtaggattctttttgcgtttccggtcgttatattgcttttgagcttttttgtcagcagaacatttagggcaaaaatttacacgtttacagaatgaaatgaaaaagcttgaaaatgtaatgtaataatcagagccattccctttattgggcgtggctttttattatgacaatttttgtgataaattttgtgacaaacaaaagaaaatagacgcaaccagacgaaacattgtttggcgtagaaacaccggaaatccttgaaaataaaggatttttgctatatgatgaaacaagttgaactctatcattgcgtaataaaaaaaaatcctgtataataccaaactgtaatattgtatcattcagcggacagagaaatacgctgtgaatcattaaaagaagtcaggaggacataagtacatgcgagtcgatgcggacgattttgcccgaccttgcagctgcgggagggagcaccacatagacgttagagaaattgtaattgaatcaggagctatcgggaaactggaaaaggaaatgtcagacggtgatctgaaagaatgtatttccccgcttctgatctgtgacacgaacagttacaaagctacagaggaactgatggaggatatctacgaccggtgtcaggtactgatcctggatgctgaaggccttgaggcagatgagcgtgccgtggagatcgtggagaattatatggaagaggacatcgatcttgttcttgcagttggagcggggacgatccatgatctcagccgttttgtcgcccatcagtaccggatcccttttgtctctgtgcccaccgcagccagttcagacggatttacttccacagtagcagacatgacctggaatggtgtaaaaaaagtatttcaggcatctgcgccactttttgtttttgcggatacggatatttttgctaaggcgcctgcaaggcttacagcagccggggtgtcggatattctgggaaaatacattgcgctggcagactggaagatagcaagtattcttatggatgaatactattgtacagcggtggcagacctggaaacaaaagcgatccggactgttaaggataatctgaaagaaattgcagcaggagagaaagatgcatgtgagaagctgatgtatgcgctgatcctttccggactggccatgcagatgacaggaaactccagaccggcatccggggcggagcaccatatggtccacctctgggatatggaagtggtcaatggccacctggatgctcttcacggggagaaggtttctgcagcaaccatgttggtccttctggaatataaaaagcttgcagatgctatccgaagaggagcctgcagagtgcatgcctttacagacggagacagagaactcctgcaggagaccttcggcagaaaagggattcttggagcacttgaaaaagaaaacactccggaacttctggacgatgtaagcacagaaacactttccggtgcacttccggaaatccttaagatcatagatcttcttcctgcagttacagatatgcaggagatgatgagtatcgtcggctgcgtgagcagagtccgggatatcggactgccgggaaaagcgatcgaggagagtctcagacttgcaccgtatacaagaagaaggttgagccttctgagacttcggaagatgctcacatactgagcaggaacagctcataaaaggttcttttgacttgacataaatttcaggaaaggcagtgatgaacggtttgatgagagtaggaatgggatatgatgtacataaactgacagagggcaggaaactgatccttggtggtgttgatattctctgggaaaaaggtcttttgggccattcggatgcagatgttctgatccatgcgatcatggatgcacttctgggagctgcggctcttggagatatcggaaagcattttccggatacagaccctgcatataagggaatctccagtgtgaaacttctggtgcatgttgccggattactgaaggagaatgactatgcgatcggaaatatcgatgccaccatcatcgctcagaaaccgaagatggcaccacatattccgacgatgagagaaaatatcgcagaagcacttgggattaaaatatcacagctgaatatcaaggcgaccacagaggaaggccttggatttacaggacagggagagggaatctcctcacaggcgatctgctccctgtacagaatcgggaaattggaggaagagtaacatgaagatttttaacacactgacacgcagaaaagaggaatttgtacctctggaagaaggaaaagtaaaaatgtatgtctgcggacctacggtatacaatctgatccatatcggaaatgcccgccctatgatcatttttgatacggtgcgcagatatatggaatataaaggatatgaagtaaattatgtatccaactttaccgatgtagatgacaagatcatcaagaaggccattgaagagggcgtttccgcagaggaaatctctacccgttatatcaaagagtgcaagaaggatatggcagatatgaatgtaaaacctgctacaactgcacctcaggctacacaggagatccagggcatgatcgacatgatccagactcttattgataaaggatatgcatatccggcagctgacgggaccgtttatttccgtgtaaagaaattcaaagagtatggcaagctttctcataagaatctggatgatctccagtcaggattccgttctcttaaggtatccggtgaggatcagaaggaagatccgttagacttcgtgctttggaaaccaaagaaagagggcgagccgtcctggccatcaccgtggtgcgacggacgtcctggctggcatattgagtgctctgttatgtccaagaaatatctcggagaagagattgatatccatgcaggcggtgaggatctgatcttcccgcatcatgagaatgagatcgcacagagtgagtgctgcaatggtaagatttttgcaagatactggatgcataatggtttcctgaacatcgacaaccgcaagatgtccaaatctctcggaaatttccgtaccgttcgtcagatcggtgaacagtatgatcttcaggttctccgcttctttatgctgaacgcacattacagaagtccgctgaacttcagcgcagatctgatggaggcagcaaagaactctctggagcgtatccttgaggcggcaggcaagctcagcgaccgtaaagacaatggggcggcagagaatattacagaggaagagcttgcgcttctcaaggaggcagaaggttttgttaccaaatttgaagctgccatggatgatgattttaatactgcagatgcacttgcggcaatttttgagcttgtaaaatttgccaacacaaacgtagacgagaacagctcaagggagtttgccggtggcctttatgaggaactttttaagctcagtgatgtgctgggactgaaaatcgagaaaaaagaagagattcttgacaaagagatcgaggatctgatccaggagcgccaggctgcaagaaaggcaaaggatttcaagagagcagatgagatccgagatgagctcctgaaaaaaggtatcatccttaaagatacaagagaaggtgtgaaatggcagagagcttaaagaaactgaaagagctgtttgatttgaaagacgcagaccttcggacctattcgccgctgacgctggcctatatcggggatggcgtttatgagctggtgatccgtactattcttgtgaaaaaagcgaattgtccggtaaatcgtctccacaaaaaagccagcagccttgtaaaagcatctgcgcagtcgggtatgatggagatcctcgaaccacttttgacagaagaagaaaaaagtgtatatcgaagaggaaggaatgcgcattccgctaccatggccaaacatgccaccatggcggattaccggcgtgccacagggtttgaggcgctgatgggatatctttacctgaaagaggatttttcaaggatactggagctggtccatgcaggacttgagaaggaggaagtttaaattgactgaaatgatagaaggaagaaatgcggtccttgaggcatttcgttccggtaaatgtgttgataaactgtttattctggatggctgtcaggacggaccggtccgcaccatcgcaagagaagccagaaaacatgataccattgtaaaatttgttccaaaggaacgattggattccatgagcgagacaggtgcacatcagggtgtgatcgcacaggttgcggcttatgattattctacagtggaagatatcctgaaaaaagcagaagataagggagagcctccgtttatcattcttcttgataatattgaggatcctcataatctgggagctatcatccgtaccgcaaatctcgcaggtgctcatggtgtgatcattcccaaacacagagcagtaggactgactgctacggttgccaagacctcggcaggcgcactgaattatacaccggttgccaaggttgctaatctgggacagactattgatgaactgaaagaaaaaggcatctggttcgtatgtgcagatatggacggagaggtgatgtaccgtcagaatctgacaggacctattggccttgtgatcggaaatgagggaaatggtgtaagccgccttgtaaaagagaaatgtgattttactaccgcgatcccgatgaagggggatatcgattcccttaatgcttctgtagcagcaggggtgcttgcttttgagatcgtgagacagagactgtcaaaataaatacatcaaatacagccatagctgttcggagaaaaaatgtgccgatataatgagatgacggatgaagctcttatcgaaagacttcgtgcaggggaatctgcaattgcagattatctgatggaaaagtataaaggtctggtcagaaaaaaagcccgtgccatgtttctgataggtggggacacagatgatctgatacaggaggggatgatcggactgtttaaggcagtccgtgattaccagccagacagggagtcgtcttttcagtcttttgcaaatatatgtattgacagacagatatatactgcaattaaaagttcaaaccgccagaaacatcagccactgaacacttatgtgtctttaagcgacggagaggcggaggaaaacttcagagattcctgtgtggagcatgataatccggaatcgatcctgatcgaccgggaaaatgtggcggctctcgaaaatgaaatgaaaaagagcctgagccctctggaaaacagggtactgcagttgtatctggatggaaatggatatatggatattgcccggatccttggaaaaacaccgaaatccattgataatgcactgcagaggatccgtgggaaaattaaaagctatttttgagaagagtaaatacctctttccttttgaatataaaagtattaaaataatattcataaggagcagaataagaaaggagaccaaattatggcaaagatcaataaatattggggacttgttgcagtaggagcgcttaccgctgccgcagcaggagctatcgcagcacttgtatccagacgatctgtatgcgaagaagactttgaggatgatttcgaagatcttgatgatttcaaggatgatgagaagaaggaagaaaaagaagagaaagaagtcttccaggactgggacaagactgcatctgagactgtagaagtttcaaaagaggcagaggatgctgaagaggcaccaacagaagcagaagaggaaacacctgcagatgatgaatcggaggccgaagcggaagaagagacagaagcagaagagacaaagacagaagagtaaaaagagaatcctgcgtgctgtgtctgtgagcgacagcacacaggattttttgtgctataatcatgaaaatatgaatttttaaaaaaataaaaataatgtattgacaatatgacaatcatctgataatataaacaactgtgagcggcacaaacgtcgcgaaacaagctgctgtggctcagtcggtagagcgtcgccttggtaaggcggaggtcacgggttcgattcccgtcagcagctttttttgtgtctaaaaacagacaattttttgtttagatacaggttttgcgggtttcaaaaactccggatttatgataagataaaacatcaggatgatatttaggagggaaagcaatggagaacgaaacagtttccaaaaactttattgaaaatattatagacaaagatcttgaagaaggcgtttatgacaccgtgcatacacgtttcccaccggaacctaacggctatcttcatatcggacatgcgaaatccattcttttaaattatggactggctcagaaatacaacggaaaattcaatctccgttttgatgataccaaccctacaaaggagaaatccgaatttgtagagtccatcaaggctgacgtgaaatggcttggtgcagactgggaagacagacttttctttgcatctgattattttgatcagatgtatgaggcagcagtgaagcttattaagaaaggcaaggcctttgtctgcgacctgactgcagaccagattcgtgagtaccgaggaactcttacagagccaggtaaagagagcccgtacagaaaccgtactgtagaagagaatcttcagctttttgaagagatgcgtgagggcaaatacggagatggcgagaaggttctccgcgccaagatcgatatggcatcaccgaatatgaacatgcgtgacccggtcatttaccgtgtagcccgcatgacacatcacaatacaggagataaatggtgcatctatccgatgtacgacttcgctcatccgatcgaggatgccattgagggtgtgacacattctatctgtactctggagtttgaggaccacagaccgctttatgactgggtggtaaaggaactggaatatccgcacccaccgaagcagatcgagtttgcaaagctgtacctgaccaacgttgttacaggtaaacgttatatcaagaagcttgttgaggacggcatcgtagatggatgggatgatccgagactagtatccatcgccgcacttcgccgccgtggatttacaccggagtctatccgtaaatttgtagaactctgtggcgtttcaaaggcgaacagttctgtagattatgcaatgctcgagtactgcatccgtgaggacctgaagctgaaacgtccgcgtatgatggcgatccttgatccgatcaagctcgtgatcgataactatccggaaggacaggttgagtatcttgaagctccgaataatatggagaatgaggagcttggaaccagaaagattccgttcagtggagaactttatattgaacgtgatgattttatggcagagcctcctaagaaatacaaacgtctctatattggaaatgaagttcgtcttatgaatgcatattttgtaacctgcacagattatgaggcagatgacgacggaacgatccgtgtagtccactgtacctatgacccggagaccaagggcggaaatgcaccggacggacgtaaggtaaaaggaacgatccactgggtggaagcatccaatgcaggtaaagttgaggtaagactttacgagaatatcgtagatgaagaaaaaggtgtttacaataaagaagatggttctcttaatgtaaatccgaattctcttacagtaacaagtgcttatgtagagccggagcttctgaaagcaaaaggttatgacagctatcagtttgtacgtaacggtttcttctgcgcagatatccatgactccagggagggagcaccggtatttaaccgcattgtatctctgaagagctctttcaaattaccgaaagcataaaaactgtcaaaaagaatacgaaacatatgacagcagtacaccgtgaacaggtatcagggtgtactgcttgttttgttttatcgtcatcaggaataaatggataagtacaaaatgctcctgcaacgatttcggttgcgcccatttacagaaacggttatactgataacacaggaaagagaggaattacacatgaagaaaatcgtgcttgcttccgcatctcccaggaggcgggaacttttaagccaggtaggagtcgcctttgaagtgaagcctgccagcggggaagaacggatcaccagtgcagagcctgcgaaagtggtggaggaactttctcgtcagaaagctatgtttacggcatacgcgctggaggaagaggagaaccgagatctgagagatgtggttgtgatcggtgcagataccgttgtatcttatgagggtaagattttaggtaaaccggcagatgagacagctgcaatagagatgctcgctatgctgcaggggaatacacatcaggtatataccggtgtaactttgttgataagagaaaaagggagatggaaagctcataccttccatgagtgcacagatgtgagcttttatccggtgacagaggaagaaataaaggaatatgtaaacagcaaagacccaatggacaaagccggaagctatgggatccagggcgcctggggagcctatgtgaagggaatccgtggtgattataacaacgtggtgggactgcctgtggcaagactgatctatgagacaaaaaaactgggaatgaacctgagaggatgaaagacaaaatgataaaagcttgtatatttgatctggatggaacaattgcggatacactggaatctatggcatatgtggcgaatgagatcatggaaaagttttccctgaaaccacagccggcagataattttcgttattacagcggtgaaggtgcagatatgctgatcagaagatgcctgatcgatgcaggagatccggagctggtacactacgaagaagtcagggaactttatcgcaggaaatttgatgaagatccgttgtataaagttgtgccatataaagatatgccggaaacccttcagaagctgaaacatacaggccttaagatggctgtatgctccaataagcctcatgttgcggcgcagaaagtggtaaaggcgatctatggcgatctgtttgatgaggtgatgggacagcaggaagggatccgcagaaagccggcgccggatggtccgctgaagattgcagaagatttcggcgtaaagccggaagaatgtatgtatatcggagatacaaagacagatatgcagacaggaagtgctgccggaatgtataccgttggtgcactatggggattccgtgacagagaagagcttgaaaataacggtgcagatattgtagcagctgtacctggtgatctgtttactatctatgaggagaagcagcatgattaagatggttgccagtgatctggatggaacgctgcttatcggtggaagacagacgctgccggaagagatttttccgctggtaaaggaactgaaaaaaatgggaatcctctttgtggcagccagtggcagacagtatgccaatatgaggaatctttttgcgccggtaaaggacgagatggcatttatcagtgaaaatggcgggcttgctgtccagaatgagaagcttctgtactgcgacagctttgacaaagaactggtcagagagatcattcaggcaatatgggaaaagcccggagcggaattttcctgttctacaaaggatttttattatatcatgcccaagacagaacattatcgccatctgatgatcgaagaagtaaaaaatcagtgtaagatcataaagagttttgatgagatcacagagccttgtatgaaggttgcagtttatgagagagaaggaatgacggaggaatccatccggtactggagagaacggttcaaagacagatgtactgttgtgacatccggatttgcgtgggtggattttgttccatttaccacgaacaaagcaaaagggatccgtaaataccaggaacttttgggaatcggaccggatgaatgcatggcgttcggggatgaatacaatgatattgaaatgatgaaatctgtaaaatacagctttgccatgaagcatgcgaagccaggggtaaaggcggcggctttctacgagacagagaaggtggaaccagtacttcgcagactgattgcggcgggcggagatataaaggaggtactttaatatgtacaagaaagaatatgtccagacatttctggaaaaacagggtcagctttttgatgagccggtagcagaggattttgaggaggcagaggaatttctcgaggattgcatggcagttgtgctggattccctgaaggatgttaaaaaatatctggatggaatgggcgcagatgtggaggggatttccctgaaggagctggaagaagaaagcgaagtatttaaactcccggacggaaaatatatgatcgtagaaggctgacggaaagcagggattacacctctgaaaattaaatatgataaacttgcatcagcaaaaagaaagccctgcgtagaaagggtaaatgtggggaaaataaaatgatgtaaaggaggatgggatatgaaaaaaagcagagtgctggcagtcgtcatggctgtgcttatgattgtaacgctgcttccatcgatggtatttgccactgcagctccatctggaaatcttgatggaaagctgaaggtcaaaggaacacttgcgatcgggtctaccttaagtgcagattactcaaaggtcaagccggaggggatcacagatgataatgtgagtttttcctggtcattaaaagacggagaccttcttacagaggtaggaactgacaagacttataaaatcgatgaaaaagatctgggtattccgatcgttctgaagatcaccggaaaagaagagacgggagtcagtggtgagcttacggtgacgacccaggaggtttccgaaacagaggaggaagccaaagcactggcagaaaagaaaaaggaagaagccaaagcagcaggagaagatccggatgcggaggaaagtgaagcttcggagtcttcagagaacacgccggatacagaagctggaacgtcagaggagcctgatagtgctcagcctgaggaaaccatagagccggcagaagaaacggagtctgcggatgtgcaggagaatacagatgtacaggaacctgcagatacccaggagcctgctgaaaactctgttatagaagtaaacggagaacagtcagggcctcagaatgccgatgaggcagatacatccggagatagtcagacagagacaccggattccgcagatacagcagcagacgcttccgaaaaaaatgaggaaccgacatattcggcatctgcatacacggaagatggaagtggaattctggattttggttccgtggaagagggatatacggaaattccggaagcacagatggttactatcacaaataacggaaccggggatcttaattttaaagagatcgccccggagaatttcatggctgcggatattaacgatgcgccattaaagagtggtgaaagtgttgctgtgtgggtaaaaccacgagaaggtctgaaggctggagaatacaaagatctgatcacgtatcagacagaagaaggtgccgatgtcttctttgaagcggactttacagtaaaagaaccggaaaataaaaaagtcgaagatcatgaaaataatgagcagacagatcccggggaaacatcggaccctgcagcggaaaaaatatacaagctaattgcggatccgacagaactgccttttgatgatctgactgccggttatgaaaaggtagaaacaacaagtacagtcacgatcaaaaacgaaggtacagaagctgtgacgttagtacagcctgagtcgaagttttttgatattgcgccggtcagtgaagtggagagtagcggaaatatccagttggcgcagggaggagagcagacctttaccgtacagcctaagcttggactctctgcaaaagatgatccatacgtggaagagcttgtatttgcttctgatgaaagcacggaagcatctgctacagtgacggcttcggttatggtaaagacagaaacaccaaaaacagttactgcaacagtgaaaccggaaggtcctctgaagtttggaacactggaacagggctatgagactgcgccggatgcacagcctgtaaccgtagagaatacaggtacagaggctatccggatccagctttctgctccggaggattatgaggtgggagagctttctgcggaagtgctcaatcccggagataaggcggcaatctttaccgtacagcccaagaccggtcttcaggccggagatcacagcgatacgatttctgtgacagatcagaataccggaaacacactggctgaagtccggctggaatttacagtttcggaaccggaacccaatcccggtctttcggtaacagacagtctggagtttggaaccaaagaggaaggctataaggaacttcctgatgcgaagacagttacagttaccaacaccggaaatacaaagatcgttctgaaacagccttcatcaaatgcatatacaattggtacactttccgccacagagctggaagcaggagataatgcaacctttagcgtacagccggtcagcggactttcacagggggaatatctggaagacattgtgatcgccaatgatgcaaatgtggaagcttatgtaaatgtccatttcagcgttacaaagaaaaaaacagataacggtaagaaggcgaataaccttacaggcatcaaaaagccatccgatatcaaagatctacccaatggaacccagaaaacccagaaagccctgaagcttccgggaacagtaaagatcactacaacaaagggagagcagaaggcatctgttaaatgggatgttaagggatcttcttatgatccgtcttctgcagaacgtcagatatttaatgtaaaaggtaccgtcattcttccggagggggttaagaatcccaacaagatcagtacagtgatcgcagtaagtattacagtaaatggatatcagggcacggaagccgctgcatcggacaataagatcacaggcattgattccaatggcaagtatgataccaatacaaagatcacctttacagcagctggtgcaggaatggataatacaaacccgcgtaagggagataccagatatcagccgaagagctggaagatcacagagacccgtacctgggatggagagccttatactgcaacattccgtgtcagcaagccgggaaaatatactctgaaagttacctttggacagcagaaatacgacggctccagctggaaggataccggtacacagtcagaaagtacggttacttttacggtatcacaggcagcagttcttactgcgactccgagtccggcagtgacacagacaaatcagaaatctgcagtgcagacgggagacagtacaccgatcatgacatttgtgatcattttgatcgtggctgtggtatgtattggaggaatccttgtatatcgtagaaagaaaaaataagaacagaatgtagaagatagttttacagcaccctccgtacaaaaaatgtacggagggatttttttgcacatagagatccgttttacatgctgttactagcactctataatgatgagtgctaaatttttcttgacttttgtaaaaagtcgtattagtatatatttattgaaaaaaacaacaggtttccggctctgtcggaacatcagaaataaaaataaaaacaaaaggagagtgacatatatgtcagcaaaacatggcagtttatcaatcaacagtgaaaatatttttccgattatcaagaaatggttatattccgaccatgatatttttgtaagagagatgatctccaacggatgcgatgcgatcaccaaactgagaaagctggaagttatgggagattatacattcccggaaggttacaaaccggctgtaaatgttatcgttgatccggatcagaaaactttgaagtttatcgataacggtattggtatgacagcagatgaagtagaggaatatatcacacagatcgctttttccggtgccacagagtttcttgagaaatataaggataaaacaacggatgatcagatgatcggtcatttcggacttggattttattctgcatttatggttgcagatgaagttcatattgatactctctcttacaaggagggttccacaccggtacattggacctgtgacggtggtacggagtatgagatggcagacggaaacaaaacagaaccgggaacagagatcactcttttcctcaatgaggaaagcctggagtttgccaatgaatatcgtatgagagaggttatcgagaaatactgttctttcatgccggtaaatatctatctttccaaagcaaatgctgaacaggagtatgaaaccatcgatgaggcagatctccgtgaagatgatgtggtagttgaacatatccatgaggatgccaagacagaggaaaaggagaatgataaaggcgagaaagaagttgtggaagtttctcctgccaaagataaagtaaagatcaataaacggccggtatccttaagcgatacacagccgctctggatgaaacacccaaatgagtgcacggatgaagagtataaagaattttaccgtaaggtatttatggattacaaggaaccgctgttctggatccatctgaacatggactatccgttcaacctgaagggtatcctgtatttcccgaagatcaggacagagtatgattccattgagggaaccatcaagctttataataatcaggtatttattgcagataacatcaaagaggtgatcccggaattccttcttcttctgaaaggcgtgatcgactgtccggatcttccactgaatgtttcccgttctgcactgcagaatgatggttttgtgaaaaagatttctgaatacatcaccaagaaagtagcagataagctcaccggaatgtgcaagacagacagagagtcttatgagaagtactgggatgatatcagcccgtttatcaaatttggatgcatcaaggatgcgaaatttggtgagaagatgaatgattatatcctctttaagaatctggatggcaaatatcttaccctgaaagactgcattgaggaaaataaaaaagaagaaacaaaagcagctgaagaggagaagacagaggagaaagcttctgaaggatcccagaatgaggaaccggaaaaaacggtgatctattatgtgaccgatgaggtacagcagagccagtacattaatatgttccgtgaagcgggtaaagatgctgtactgctgaagcatgtgatcgattcacagtttatttcccatcttgaacagcaggatcagacgatccagttcaagagaattgatgccgatctgacagaagagcttcgtgaagacggagaagcggatgaaacaacagtcaagacacttactgaggtgttccgtaagaatcttggcaaggataaacttgaagtaaaagtagagaagctgaaaaatgagggaactgcagcgatgatcactcttcctgaggagagccgccgtatgcaggatatgatgaaaatgtacaatatgtacggaatggatccgaatatgttcggtggtcaggaagtacttgtactgaacgcaaatcatcctcttgtaagatttatagcagaaaatcagggatcagagtatgttccggtgatctgtgaacagctttatgatcttgcaatgatgagccataaacagctttctcctgaagaaatgacaaaatttgtaaagagaagcaacgatatccttatggtccttacaaaataaaacgacatataaaatgatcgaaaggctttgcccgtaatggggcgaagcctttgctttttttataacaatatgtgtatctttaacacaattataggaattttaaataaaataatagatattaaataaaaataacctgtaaaatatgactaaaaatttaaattagtatctaatatgtataaaataaattttcagaagaaagcgaaaaatatagataactgtcgtattatacataagggagtgcttttaaaaagagaaaaaaatgaaatggaggaacaaatgtatgaaaaaggtgtatggattgatcagaagacttggtgcaaattcgaaatacaaaggatattttttcgttgcggaagcggtaaagatttccatgggggatcagtataaaccattgcggatcacaaaggatatttatccatacctggcgcggaagtacagatcaacacctaccaatattgagcatgatatcagaacaatggtaaatgtgtgttgggaaggaaataaaaaactgctggatgagattgcaggatatcctctagaatacaagcctaccaacagtgaatttattgatatgcttgcgtattatctgagggaaatagaagaagagaattgactatagcctttcaaaaagaatctgattcctggacagaaagctcaggatcatatcatcccagagctgctctgggcgtttatccatagagaatgttttaagagaggttccggtagtacaaagaaggctgttatttttaaattgaagatttaagaatagtccgtctatctgttcggaggaaattccgaaatctgtatttctcattgcagcttcaactccactccgacttaaatgcagcacgatcctgaagcttaagggcgtacgcttaccgcggatcacagaccagcagaaaggtctgatgtccttccagagagaatgtgtccggccgtgctctgtgagtctgttcatgctgtctgtatcaaaaaaatctttctgaagcctgccatcaatggtaaaagtattaaaagtagtcacagtcgcttcggacagacagaatttgtcaaatacttctcctataaaaagtttgtttgtgaaatcccggatatctgtaatctttaatgcaagcatgccgcacttcctttcttttatgtgatcgcgtgtagacattatatctcagataaagaaaaaaggacagactttttaaaaaactcttttcaaatatctgtttatgtgatacgatagatgtggtattgaatactacatataatggaaaagaggacgatataattgagctataagattgcgatagatagctgtggggagcttttagatgaatggaaaaatgatgaaaggatcgaatccataccgctgacactgacagtgggcggtgagaatatcatagacgatgcgacttttgatcagaaggattttttgaagaaagttgcagattgcccggagtgtccaaaatctgcatgcccttctccggaacgctatatgaaggcatatgagtgtgaggcggaacacatttatgcggtgacactttcggcggaactgagcggttcctataacagtgcgatccttggaaaaaacctgctcctggaagagcagccggagaaaaaggttcatgtatttaattccaaatcagcatccggaggccagagtctaatcgccatgaagatcatagagtgtgaagaaaagggactttcttttggagaagtagtaagcgaagtggagaaatatattgaagagatgagcacattttttgtgttggagaatctggaaactttgcgcaagaacggacggttgagcagagtgaaagctctggtggccagtgcactgaagatcaagccggttatgggctctactccggaaggaacgatctgtcagctggatcaggccagaggcatgaataaagcaatcgtaaaaatggtggatcacattggggagaaggggatcaacatcccggaaaagacagttgccatcactcattgcaactgtccggaaagagcgaagatgctggaggaggctatccgtgagaaactgcacccagcaaagatcgtagttatggatactgccggtgtcagcagtatgtatgccaacgatggtggcgttatcgtagcagtctgatcagagaaaatctccagttcagaaaattatcacatttcttcagggagttgccgcttttcttttgaaaacaagtgtgctataatgaacgaagtactgaagcggcaaaggagaaagacaatgagccagaagaaagttgacaaatataaaaacaacaaatactcgcgaaacagtgccctgaagaaggaacgcgcagaatttgtacttgagatggcggcatggatcctcatcgcggttctgcttgtaggctggatcggatattccgcatatgccaagatccaggcgaaggaagccagtgtgaaggtggatactgtgatggatacttctgcattgacagattatatttccggattatcttcagacagtgcggaatagaaaacacatatgaaatgatgggttcccgggatgtgttgaagcatcccggggatttttatatacaggataaatataatgcaataaaaaacgggtctgccataaagcagccccgttttgacttatacgttttttatggttatagaattataactttgtaacgttagcagcctgcattccgcgagcgccctctgttaagtcgtaggatacagcctgtccttcttcaagagatttgaagccttcaccgttgatagcggagaagtgtacgaatacatcctgtccgtcctcacctgtgataaaaccataacctttttctgcgttgaaccattttacagttcccttgttcattttgtgttacctccataaaaataaaaaaaattaaaatagccttctgatgataataaaaaatcaccagattttacagactatattcatgtaaatataatctctaaaaactagtgattttacattaaatattttgccatgctctgattatataacccgtgttttgaaatgtcaaggagaaaattccaacaattccggggtgtaaaaaggggcgaaattgctttgtaaaaaaaatctttataaatagagagatttcgtgtatgatataggagaatacaagcggattgaaggatctgctttgaaaatacaggatgagaggagaacagaaatggggattctgattcgaggaggccggatcgtggatgcggctacagatacggataaaacaggcgatatttatctggaagacggaatcattgcggaaataggccagaagctgaaaaagaaagacggcgaccgtgtgatcgatgcgaaaggaaagctggtcatgccgggaattatcgatcttcatgtccattttcgtgatccgggccagacacacaaggaagatatcaagagtggtgctgctgcggcagcacgtggtggtgtgacaactgtagttgctatgccaaatacaactcccactattgataatccggaccgggtaaactatgtacataacaaggcggcgcaggtttccggtattcatgtacttcaggcaggtgcagccaccatgggagaaaaggggactgaacttgcagatattgccggaatggtgaaagcagggatcccggcagtgtccgaggatggtaaatctgtgatgaatacagcactttgtaaagaagcaatgaggatcgcagcagaatgtggcgtgccgttttttgaccattgtgaagatatcgatctgcgtggagatggatgcatgaatgaggatgagaacgccaaaagactggggcttcccggaatctgcaatgcagtggaagataccattacagccagagatatcattctggcgctggagacaggagtccatcttcatctctgccactgttccacttatggggatgcccagatgatgaagatcgtaaaagagaaaggatacgacaatatcacagctgaggtatgcccgcaccattttatcctttcatccgatgatattaaaacagatgacccgaattacaagatgaatccgccgctccgtacaccgaaggatgtggaagcactgaaacagggcctgaaggacggtaccatcgaggtgatcagcacggaccatgcaccgcacagtgcacaggaaaaaacaggttctatgaagaatgcaccatttgggatcgtaggtctggaaacaagccttccgctcacctatacagagctggtggaaaaagatgtgatcacactgaaacagatggttgagaagatgtgcctgaacccggcgaaaatcctcgggcttgacagaggaactctccagaaaggccatccggcagatgtgatcatcgtggatacggagcaggagtatgctatcgataaaaataaatttgtttccaaaggacataacacaccgtttgatggctggaaagtaaagggaaaagtgctttataccatctgtgacggaaaaattgtatttaataaccaggaggagaaagaatcatgattaacaaactgatcagcaatatccgcaaaacaaatgcaccaatcgttgtaggactggatcctatgctgaattatattccggagcatatccagaaaaaggcttttgcagagtttggggagactctggagggcgctgcagaagcaatctggcagtataacaaaggaatcgtggatgcgacctttgatctgatcccggcagtgaaaccacagatcgccatgtatgagcagtttggtatcccgggactgatcgcatacaagaaaacggttgagtattgtaaatccaaagatctggttgtgatcggtgatatcaaaagaggtgatatcggttccacatctgcagcatatgcagttggtcacttgggacaggttcaggtaggctcaaaaaaatatgcaggttttgatgaggattttgcaacagtcaatccataccttggttctgatggtgtgaaaccctttatggatgtatgcaaggaagagaaaaagggtatctttgttctggtcaaaacttccaatccatcaagtggtgagttccaggatcgtgtcatcgacggtcgcccgctctatgagctggtaggtgagaaggttgcacagtggggcgatgagcttatgggtgatggatatagttatgttggtgctgttgtaggtgcgacctatccggaaatgggaaaggtattaagaaagatcatgccgaagacatttatccttgttcccggatatggtgctcagggtggaaaaggcgcagatcttgtccatttctttaatgaggacggacttggtgctatcgtaaactcttccagaggaatcatcgctgcatataagcaggagaaatataaagagtttggcgctgaaaattacgcagatgcttccagagcggcagtaaaagatatgatcgcggatatcagcggtgcgctggagaacagataatacaggaggcattttatgagtacatcagaaagtaaaaaaacaaaaaagccctgtaagatactcagccaggaatgtattggtacagatatttacagtatgtggctggatgcaggtgagattggaaaaaatgcagtgccgggacagtttgtatcactttacagccgcaatggcggtaagcttctgccaagacccatcagtctctgtgagatcgataaagcagaaggaaaactgagactggtatatcgcgttacaggaaaaggaaccggtacggaggaattttccagacttcatgcaggggtccccattgagactatgggacctctgggaaatggttttccgctggatgcagtaaaaggcaaaaaagtgtttctcatgggtggaggaatcggaatcccgccaatgctggaaactgctaaacagctggacgcagaaaagatcatggttctcggatacagagatgagctgtttttaaataaggaatttgaagcttatggagatgtctatgtggcaacagaagacggctctgcaggaacaaagggaaatgttatggatgccatccgtgagaacgatcttgaggcagatgcgatctttgcctgcggacctgccccgatgctccgtgccatcaaggcatatgcccttgaaaaaggaattccgtgctggatctccatggaagagcgtatggcctgtggcgtaggcgcgtgtcttgcctgtgtgtgcaaatccaaagatgtggattctcattctcatgtccataacaagagagtatgtaaagacggacctgtattcctgagcacggaggtagagctatgagcagaatgaatgtaaatcttgccggcgtagaacttaagaatccggtgatgacagcgtccggaacatttggttccggagcggaatacagtgaatttgtggatctgaacagacttggcgcagttgtgacaaaaggtgtggcaaatgtaccgtggccgggaaatcctacaccgagagtgacagagacagcatccggaatgctcaatgccattggtcttcagaatccggggattgatgttttctgtgaaagagatattccgttccttaaaaaatatgatacaaagatcatcgtcaatgtctgtggaaaatctgcaaaggattactgtgaggttgtagaacgccttggaaatgagcctgtggatatgctggagattaatgtttcctgcccgaatgtcaaggaaggcggaattgccttcggtcagaatccgaaagctcttgaagagatcacaaaagaagtaaagaaatatgcaaaacagccggtgatcatgaagctgagcccaaatgtaaccgatattaccgagatggcgaaagcagcagaagctggcggcgcagatgttctttctcttatcaataccctgacaggaatgaagatcgatatcaacagacgtacatttgcactggcaaataaaactggtggaatgtccggtcctgcagtaaaaccggtagctgtccgtatggtatatcaggtggcaaatgcagtatcccttcctatcatcggtatgggaggaatcgcaactgctgaggatgccctggaatttattatggcaggtgctactgcagtgtctgtgggaactgcaaacttttttaacccttatgctactgtggagatcgcagatggtattcaggcatttcttgaaaaacagaaagtggaagacatcaatgagctgatcggagtagtgaaataacggaggattgccgtatttgcaattctgttgttcatatgttagaattaacaggataaataaagggattttacactgggattgcagcagagtgtggatcctgggtttgtcgtatatatgaaaaacatggaggattagataaatggaacagtataagcaggaatttattgaatttatgattgactgtaatgtcctgaaatttggagattttactacgaaatcaggaagaaagacaccattttttgtaaatacaggattttaccgtaccggtgcgcagcttcgcaagctgggacagtattatgcaaaagcgatagaaagcaaattcggactggattttgatgtgctgtttggaccggcatacaaaggaattccgctttctgtagcagcaactatggagatcagtgaaatgtacggaaaggatatccgttactgttccaaccgtaaggaagtgaaagaccacggagataaaggaattcttcttggcagcccgatccaggatggggataaggtagtgatcattgaggatgttacgactgcaggaacatccattaaagaaacacttccgatcatcaaagcgcagggagatgtaaatccgataggtcttgtggtttctgttgaccgtatggaacgcggccagggaacaaagagtgcgctcaaagagatcgaggaaacctacggccttcagactacagctattgtaactatggcggaggttgttgagcatctctacaacaaagaatacaaaggccgtgttgtgatcgatgataagctgaaagctgccattgatgcatattatgaccagtacggcgcagaataatattgttataaaaggtcataaaagagcggcggattccgaaggtccgcttttactgggaggacgcagccttatgaatgaaaaaatttataaaactatggcgagcagcggggcgggaagccttgcactcggtattgtcgttctggtgacgggacttgtcacaggaattctgatgatcgtgaacggtgcgagactgctcagaagaaaatcagagatattaatctaatatgatctgaaaagccgcacgttgttccgtgtggcttttcggactatttaagcaggggagaatattggaaaaagggacaaaacgcagagtaaaaaaactcgggacagctttttttgtattgtatgttcttgttcttgtgtatcttctgttcttttccgaaggatacggaagagtggcggatgcagaaagagaataccgttacaatcttgttccgtttgtggagatcaggcgtttctggacttatcgaaaaatagtgggtacatttgcgcttttcacaaatgtttttggaaatgtgctgggatttgtgccatacggatttattcttccggtaataaccggaaaaatgcgaaatggcttttttatcatattatccggcttttttatcagtctgacgatagaagtgatccagctgcttacaaaagttggctgctttgatgtggatgatatgatattgaatactctgggcgcagcgcttggatatgggatttatgcagtctgcgacaggattaggagaaaaattaatggcaagaagatatagatatgcatttgcaaaaaaaagagaagcttccaagggaaaatggtctgtaggacttgcggcggcttccctcgtgctgtttatcgcggcagttgtgcttgcactcttttttgatggaaagctcgggggcctgatcggcggaaccgggctttttgccatgctgctttctgcatatggctttacactggggctttccagcttttcggaagaaaaccggaaacacaggacgagcatggtcgggtctattttgaacggagtgatcctggttatctggctgggactttttttatcgggggtataacagatggataaaaaagaacgcttaaaaaaacagctggactttattatggagatagataaagtcaagaatattttccgacagacatatcttgcagacggaaagcggaaagagaatgatgcggagcattcctggcatctggcgttgatggcggtgcttttaaaggaatattccaatgaggaagtggatctttcgaaggtgattcctatggtactggcgcatgatctggtagaaatcgatgcaggtgatacctatgcatatgatgaaaaaggagcgacaaccaaggaatacagggagaagcaggcagcagaacggatctatggactattgccggaagatcagggacagtggttaaaagcattatgggaggagtttgaggcttacgaaaccccggaggcgaaatttgcccatgtgctagataattgtcagccattgtttctaaatgatgcttccaacggaaaaagctgggaagagcatcaggtgaagaaaagtcagatttataagagaaaccggaaaacaggagagggttctgaagtgatctgggaatatatgaaagaactcgttgacaaacacattgccctggggcatgtgatcgatgatgaaaaagatgggagatgaagtcttggaagaatgcatgaaagaacgttatggacttgcgaaggaacggatccgtgagatcataacagaagaaaccgtaaaaaaaccgtttggagattttttcagaaacagggcaaagtttctttccatggcagcagatgtgatggatgagagcgcagcagagcttacgatggaggtgttgaaagagagaaatcattgcttttatcaggatatcctcccggaaaattatgaaagcagctatggaaatccggcgtatgcagtacagcagatgggagaatatggaaaagccttcagttttctgtatgcagagatcgcaggaactgtagcttatgctcatgagaaaaggctgtgggatatgactgtatccatggaactgtttctagaagtatattctgcattttgtgaggaagaacttccggaggcggcaacagtggaggggattctccgttcctatgtaaatgattactgccaggatatgatggagcagaggatacgggaaggtgtagatccggagcttgactttgcagcagatatcatcatgaattcggatctttcggatctgagatatctgtatcgctatggcgagtttgtttcagagaatgaaacaggagttgcagagtttctgaactccctttctcaggaagagatcgataagatggcttctacctatacagaaggctatcggatcggatttatcaccggacggaaggatatcacaaaaaagaaaacagtaaatatccgatatagtcttggttttgaacggatggtaaaagcagcgatcctccagtttgaaaaaatgggtctgaagccggtgatctatcgccatgcaacgcatgtggtaaataagagaggcgccgtgagagtaggctatacaggcggcgttgccaatccgcagtacgattacgatcatcgtcaggacagtgcattgttcctggatggggattttgttcagcgaaaacttcgtgctatgcagacctcctatgagaagtacagagaactggcagaagtacatggcggtccggcctgcattgatacatttggagaaaatcctttctctccgataagtaaaccggaagcttatgcattaagcgagacacagcagaagcttcagacagaacttgacaatgaatccggacagatcgtaaaccgatacatcaaaggtgatgagagaagttttacgatcattgcatatccggttcctgagattggtggaaattatgaggaaattttccgtgagatcgtaaagatcaatacattggattaccatctctatcaggaaatccagcagacgatcatcaataccctggatacctgtgagtgggtggaagtcaaaggacgtggagacaatgagacggatcttctgatccatcttcatgaactgacagatccgaagaaacagacgaattttgagaactgcgtggcagatgtgaacattccggtgggcgaagtctttacatctccgcagctggcaggcacaggcggaatccttcatgtgaaaaaagtatatctgaacggtcttcagttccgggatctgaagctggtatttgactgcggccaggttattgattacacctgctcgaattttaaaaccgaagaagagaaccggaaatatattgaagataatatcctccaccaccatccgaagatccccatgggagagtttgccatcggtacaaataccacagcttatgtggcggcgctgaaatacggaattgcggataagcttccgatcctgatcgcagaaaaaatgggaccgcattttgctgtgggcgatacctgttacagctgggcagaggatacaccggtatataatccggatggaaaagagatcattgccagggataatgagatttccgagatgcgaaaggatgacgtaagccttgcttattatggctgtcatacagatattacgataccttatgatgagcttggaagtatccgggtgatcgatgatgagggagaaatgatctccattatcgaaaacggaaggtttgttcttcccggaacagaggaattgaaccgtccttttgagaatcttccattaaataataatataagttaattagtaaatttacagtttttccgatcgtattgacagaaagtgagaatatacgtagaataaccataacaatagtcaaaggacacaggctaatattcagttagtgtaccatgaaaggagaacacaatggcaaaagtaggaattgtaatgggtagtgattcagatatgccggttatgagcaaagcagcagatatcctggagaaactggggattgattatgaaatgaagatcatttccgcacacagagaaccggatgtatttttcgagtatgcaaagacagcagaagaaaaaggcttcaaagttatcatcgcaggcgcaggaatggcagctcatcttccgggaatgtgcgcagcgatctttccgatgccggtgatcggtattccgatgcatacaacctctctgggaggaagagattccctttactcaatcgtacagatgccaagcggtatcccggttgctacagtagcgatcaatggtggcgccaatgcgggacttcttgctgccaagatccttgcaacttccgacgcagagcttctttccagactgaaagcctacagtcaggatctgaaggagcaggttgagaagaaagacgcaaggcttcaggaagttggatacaaaaattactaaataaatcttttaccataaaaataaaaaggtgttgtcataaggaggacattatggattacaagacttcaggcgtagatattgaggcaggatacaaatcagtagagctgatgaaaaagcacattgccaagacaatgagaccggaggtacttggaggaatcggtggattctcaggtgcattttccatggagaaattcaaagatatggaagagcctactctggtttccggaacagacggatgtggaaccaaggttaaggtagccatggttatggacaagcatgataccatcggaatcgatgctgtagccatgtgtgtaaatgatattgcatgtgcaggcggcgagccattgtttttcctggactacattgcttgcggcaaaaattatcctgaaaagatcgcagagatcgtaaaaggtgttgcagagggctgtgtacagtctgaggcagctctgatcggtggtgagacagcagagcatcctggacttatgccggaagatgagtacgaccttgccggatttgcagtaggagtcgttgacaaaaaagatcttcttacaggagaggccctgaaaccaggagatgtcctgatcggtatggcttccacaggagttcacagcaatggattttctcttgtacgtaaagtatttgacatgacaaaagagtctctggatacttattatgaagagcttggaacaactctgggagaggcactgatcgcaccgaccagaatctatgtaaaagcgctgaagagcatccgagagtctggcgtgaagatccatgcatgcagccatatcacaggtggtggattttatgagaatatcccgcgtatgctgaaagagggaaccagagctgttgtcaaaaaagacagctatccggtacttccgatcttcaagctccttgctgaaaaaggaaatattgatgagcatatgatgtataatacatataatatgggtcttggaatgatcctggcagtagatcctgcagatgttgacaaaacaatggaagctatccgcaaaaccggcgataagccatatgtggtaggatccattgaagagggagaaaagggagtgaccttatgttaaagatcggtgttcttgtttccggtgggggaacgaatcttcaggcgatcctggatgctattgatgcaggagagatcacaaatgcaaaagtggatattgtgatcagtaataatgcctccgcttatgctctggaaagagccagaaagcatgatatagaggcggtatgcatcgcaccgaaagactatccggaccgagaagctttccataaagcattactggcgaagcttcaggaaaaagaggtagatctgatcgttcttgcaggatatctggttgcgatccctccgatgatggtggaagcgtatcccaacaagatcatcaatatccatccatctctgatcccgtctttctgcggaaaaggtttttatggacttaaggtccatgatgcagttcttgcaagaggcgtgaaagtaacaggcgctacggttcatttcgtagatgccggaacggatacaggtccgatcattcttcagaaagcagtaaaggtaaaagacggagatacatccaaggagcttcagagacgtgtaatggaaaaagcagagtggaagatccttccggaagcaatcaatcttatcgccaatgacaagatcacagtgacagatggaattgtttctttaaagtaatcagcagacagatgaaacaaaggagtaaacagatgaaagtattaatcgtaggaagcggcggaagagaacatgcaattgcatggagtgttgcaaaaagcccgaaagttgacaagatctactgcgcacctggaaatgcaggaatcgcagagtatgcggaatgtgcagatatcggagcaatggaatttgaaaaactggcagcctttgccaaagaaaaagagatcgatcttactatcgtgggaatggatgatcctcttgtgggcggaatcgtagatgtatttgaggcagagggactgcgtgtgttcggaccgcgcaaaaatgctgctattctggaaggctccaaggctttttccaaggatcttatgaaaaaatacgacattcctacagctgcttatgagaattttgatgatccggaaaaagctctggaatatttaaggaccgaggcaaaattcccgatcgttttgaaggcagatggtcttgctcttggaaaaggagttctgatctgtcaggatcttgcagaggcagaagctggcgtaaaagagatcatggaagacaaaaaattcggaaatgccggaaataccatggtaattgaagaatttatgactggccgtgaggtttccgtactttcttttgtagatggaaagacgatccgtaccatgacatccgcgcaggatcacaagcgtgcgaaggatggggatcagggactgaatacaggcggaatgggaacattttctccaagtccgttctatactccggaagtagatgaattctgtaagaaatatgtttatcagaaaacagtagatgccatggcagcagagggacgtccgtttaagggaatcattttcttcggactgatgcttactgcagatggcccgaaggttctggaatataatgcaagatttggggatccggaggcacaggttgttcttccgcgtatggagaatgatatcattgaagtaatggaagcctgtgtagacggcaaacttgatcagatcgatctgaaatttgaggacaatgcagcagtttgtgttgttcttgcaagtgatggatatccggtaaaatacgaaaaaggtatcccgatccatggatttgagaattttaaggacaaagacggatactactgtttccatgcgggaaccaaatttaaagatggagaaatcgttacgaacggtgggcgtgttcttggcatcactgccaaaggagagacattaaaagaagccagaaagaatgcatatgctgctacagagtggatcagctttgcaaataagtatatgcgtcacgatatcggaaaagctatcgacgaggcttaagttggtcatttttcacaggcacagcttgacgaaaacagggatttcattgtacaatagtaacaactatgaaacacagtgagtagttacgaacatgaaaagctggatgctgacagggcacaacaggaaccaaccattttccttgatgaggtgtcgcatccaagtgatgaggcagagaggacagaaaaatgggaatcagtgtagaagaagcaatccatgagctcagaaacagggaggaagtatttgttgcatattcacaggcaaccagacttccatatgtgacctgtgatgaagaaacatttaatgaccaggcaaggatttttgccacagaagaagagatcaaagaatatggtaaacagctccttgaggataagatccttcttatgggcatgaaatatgagaaaaaagactatccaagactgtatggtacgctgtacgcgatcggagtgaatagtgtgatctggatcgacggagaagagaagatcgagattgagatcggaaagatcgcaaaccagagagatatgagtaagatcgagccgtcaaagagaccgcttctgaacccgtctcttgaactttccggaatctattttatgcaggaattgcgtcgcccggtaaaacaggaagagcataagaatatccgtgagctggaagaagagctgatagctaacctgcgtaaggcagaattcctgatcgcgatcaatgcagagcaggaagaagatggaaagctccatattccgtatctgaaaaataaagaggataagatcatgcagcctgtgtttacagatgttatggaatttgagaaatttggaagaggcaagaatctccgtgttgcgaaagtgactatagacaaacttccgagcctgatgattccgcaggcaaacgcttatgtggtaaatccaatgggatttaatctggttcttaacaaagaacaggtagagaagattgcagggatcagtaaataaaaacaaaaatcacagcaggctgccaggatgaaactgtgcagccttttgctgttgtagaggagagattaccctatggtgatagaaatcgattttaacagtgatgaggcaatctatatgcagatcaccaatcagatcataatggggatcgctacatcaaggcttcatgaaggggatactctgccttctgtacggcagcttgcaagcattgcaggaatcaatatgcatactgtgaataaggcatatgcgctgcttcgtcaggaaggctttgtgactattgacaggcgaaagggagcggtgatctccatagatgcagataaggtcagagcactggaagaaatgaaacagaatctgacagtagcaatggcatggggatgctgtaaaaatgtaacaagagaagaagtccatcagctggtggacgagatttttgacgagtatgacacagacagataggaggagacatcatgcaggaacgatatacaaaacaggcagagaatgttcttgctctggcaaaagaggcagccagctcctgcggacatagttatatcggcacggagcatctgctggtcgggcttgtagaagaaaaggagggcacagcaggaagagttctggaggagtttgggatccaggctgataaagcgatggctctgatcgataaactgatcgcaccgccgggaaatacggctgtttcacagaaaccgggattcagtccgagaaccagaagagttcttgagggtgcatatgcagaagcagaatccatgcgttttgaggaagtcgggacagaacatattctgctggcaatgttgaaagaaacagactgtgtgggtaccagactgctgtacacaatgggtgccaatatccagaagctttatgcggcagtgctgacagctatgggaatggacagcgatgccattgcggaagaattccaggctgtaaaagcttcaaagggaagaagcagtagtgtaacaccaactctggatcagtatagccgagatctgacggccatggcagaagaaggtaagctggatcctgtagtgggaagggataaagagattgccagactgatccagatcctgagcagaagaacaaagaacaatccctgcctgactggagaaccgggagtaggaaaaacggctatcgtagagggacttgcacagcggatcgtcacaggaatggtaccggatactgtgaaggataagcgggttgtagttctggatctttccggaatggtcgcaggaagtaaatatcgcggtgagtttgaagaacgtatccgaaatgtgatcgatgaggtaagcgaacagcagggaatattgctctttattgatgagatccatacgatcatcggagcaggtggagcggaaggtgcactggatgcttccaatatcctgaaaccgtctctttcccgtggagagatccagctgatcggagcaacgacactggaagaatatcggaaatacattgaaaaggatgcagcgcttgaacggcgttttcagcctatcatcgtggaagagcctacagaagaggaggctgttgaaatcctgaaggggctgcgcccatattatgaaaaacatcatgatgtagagattctggatgaggcccttgaggcggctgtaaaaatgtccgctcgttatatcaatgaccggtttcttccggataaagccattgacattattgatgaggcagcgtcgaaagtacaactggcgggatatcgtccgtctccgaaagcagaagcactggaaagagagatccacgatattttgaaacaaaaagaacaggcagtcataaatgcagatcttgaaggtgcaaaagcagcacaggcaaagcagaatgaggcggaagcagaattggaaaagatccgaagaaaggcggagcggaaaaatcggaaaaatccacttacagttgatgaagaggcagttgccggtattgtgtctgactggacaaaaatacctgtacagcgtctgacagagggggaatcccgtaggcttgcaaatttggaaaaggttctgaaaaaacgtgtgatcggacaggatgaggcagtttctgcagttgcccgtgcggtaaaaaggggaagagtaggattaaaggatcccgcaaggcctataggttctttcttattcctgggacctaccggagtgggaaaaacggagctttccaaagcgctggcggaagctgtatttggaagtgagcaggcaatgatccgtgtagatatgtccgaatatatggaaaaacatagtgtttctaaaatgatcggatcgccgcccggatatgtaggctatgaagaaggtggacagctcagcgaaaaagtgcgcagaaatccatacagtgtcattctttttgacgagattgaaaaggctcatccggatgtgtttaatattcttctgcaggtacttgatgatggtcatattacagatgctcaaggcagaaaagtggattttaagcagacaatcattatcatgacttccaacgcaggtgcgcagatgatcatggaaccgaaacatcttggatttatgtccggagatacggaaaagcgtgattatgaacggatgaagtccggagtgatggaagaagtgcggcggatgtttaaaccggaatttctgaaccggattgatgagatcatggtattccattctctgaataaagaaaatatcaggaagatcgttactattcttttgaaaaacctggaaaaacgctgtcaggaacagctggatatcatactgaaagttaccggagcagctaaagatcttatcgcagatgcaggctttgacagtaaatacggtgcaagaccgctgcgtcgtgcgatccagacaaagattgaggatgagatggcaacagaaatccttgcaggtcggatcaaagccggtgataccgtacaggtgaaggtcaaagacaagaaaatctactttgaagtaaaagatgcggagaaagcgtaagaattttattactttctatagccaaaaaaacagaaataagttataattaacaaaattaaaactatacaacgaaagatttcaggaggacataagatcatggcagtggtacaggaattgatccgcacagaagataatgggactatcagttttggagattatgaattaaatcagaaatccaaattgtcggattatcagtatcagggagatatgtataaagtaaaaacatataaggagatcaccaaacttgagcgtaatggaatgttcgtatatgagtctgttccgggaaccagtgtgttccatcttcagcaggatggaacagcaatgagttttgaggttcagggctttgaggattctcagattactgttgaactggaagctgagacagagtatcaggtatttattgatgatgtaagtacaggtacaatgaccacaaacctgggcggcaagctttctttcagtgttgaactggatgcgaacaccaaagcagaagttaaaattgtaaaatgctaaaaaataaaaaaacggtttatttctgtcaggaatgcgggtatgaatcagccaagtggatggggcagtgcccggcatgcaaggcatggaatacttttgtggaggaaacggtttcttccaaaaaatcttcctcagggagtattaaaactacacaaaagaaaacggagcctgtagttctgaaagatatcagtctttcttcagatgaacgtcagagctgtggaatcggtgaacttgacagggtgctgggaggcggaatcgtccccggctcccttgttttggtaggtggagatcctggtattggcaagtctacattgttgttgcaggtgtgcagaaatttatcttcacaggggatttctgttttgtatatttctggtgaggagtctctcagacagatcaagctccgggcagatcggcttggaacgtttaatgataaactgaaactgctctgtgagacgaatcttgaaaatatccgggagatcattgagcggacgaaaccagatgtagctgttgtggattctatccagacgatgtttcatgaagatatttcgtctgcaccgggaagtgtttctcaggtgagggaatctaccaatgtactgatgcagatcgctaagggtatgggagtgtccatttttatcgtgggtcatgtgaccaaggagggaaatgtggcaggtcctcgtgtactggaacatatggtagatactgtgctttactttgagggagacaggcatgcttcttaccggatcctgcgtgcggtgaaaaatcgttttggttctaccaatgaaattggtgtttttgagatgcagaattccggacttgaagaagtgaagaatccttccgagttccttttgaatggaagaccggagaatgcttcggggtctgttgttgcatgttctatggaggggacgagaccgattttggtggagattcaggctctggtgtgtcagagtaattttggaattccgagaagaacagcagttggtacggattttaatcgtgtgaatcttttgatggcggttctggagaagaaggcgggagttcatcttgctgcttcggatgcttatgtgaatattgcgggtggcatgaagatgacagagccggcgatcgatctgggtatttgtcttgctattatttccagtgcgaaggagatcgtgatcccggattctgtgatggcgtttggtgaaattggtctgagtggcgaggttcgtgcagtgagtatggccggacagcgtgtgcaggaagcgaaaaagcttgggtttgagacggtgatacttcctgaggtgaaccggacggctacagagagtattaaaggaattaaattggtttatgtggctgggatccgggatgcgatttcttttatcagagggttgtgagttcccggcaggttattttgaataggatcatgtggtcagccgctgtatggtttgtacggcggctgtgtttgggttaatagataaaaaaacatagatgatagtaagggaaaggctggtgttggttatgggtattggtaatattggaaatattggaaatatgatgaaggttatgaatgcatggaatacatttaaacagaatcatccgaagtttccggcattttgtagtgcggtttcccggcgggggattcgtgaggggagtattcttgaggtgacgtatattagccctgagggtgagaagctgactacgaatattaaagtgcaggccagcgatcttgagttgctgagagaactttctggtggtaattgagttgagcggatagcgaatgttgattatatattgtataggtctgtttgacgggtgttttggtttcggtgtctggcagtgttggaactgccgggtgccgttttttttgttgggatggagagggacgccagagggaggtggcatcggtccggggagtggatgcagtcggtggggtttttgaggttttgtgggtggatgtggttgagggacgccagaggaaggtggcatcgctccgggcagggactccgtcgggggatactactagggctccgtgagacggctaaaagcattgcggcagggccagaactcgcctgcggctcagacagcaggccctgccgcaataacgccgtctcccgcagcccaagtagtaatcacccctcctccgcagcagcccggcccgatgccaccttcctctggctgacgcttccagccgacaggaaaaaacatgcgggggatggaagcggactgggcgtcctgtcctgaaatgtcagaccggtacagaatattcctataagtatcgaagaatacagaaacaggatcggcccagcgtatcaccataaatatcgaagaatacaggaaccagatcggcccagtgtatcaccataaatatcgaagaatacagggaccagatcggcccagcgtaccactataagtaccgaagaatcccagaaccagatcgcagatcgcagatcggcacagcgtaccaccataagtaccgaagaatacagaaaccagatcggcacaacgttccacatccaataccgaagcatacagacaaaagtcaacaacgcagcacacacaacaacgcagaactccttccgtgcccaagagggtgggggtgcagggggagggccttcgggctacggaactctgagatggccttccccctgcatattcccgcattgaaaatgcgaccggcatagcgccatccagcgaagagacttattattaaaaaacaacacgataaacaacacaataaacaacaataaagataatcctaaaattacaaataagaataaaaaattgtcctataaagataaacttccaggaaaatctaaaaaaattgaaatttatggttgacaagcataactcccagtggtattataactgagctgtcgcaaataattgtttttaaaaaacaaacaattaaaaagaatttcagaaaaataaaatttacagttgacaaaagacagaagatatgataaagtatccaagtcgtcaacaaaacgacaacaagatcttaactcaaaaatgtttgaaaaaaacttaaaaaagtgcttgacaaacaaaaagagatgagataaaataaacgagctgtctgagagacagacacaacaaaccttgataactaaacagtgaaacacatacgattctcgaaaatttctttacatttaaagaacggtttaaacaaaccaaaagcagtaaaaacgagagatagccaaacggttgtcttgagtaaaagattcaaacactttatcagagagtttgatcctggctcaggatgaacgctggcggcgtgcttaacacatgcaagtcgaacgggaaaccttttattgaagcttcggcagatttagattgtttctagtggcggacgggtgagtaacgcgtgggtaacctgccttgtacagggggataacagtcagaaatgactgctaataccgcataagcgcacaggaccgcatggtccggtgtgaaaaactccggtggtataagatggacccgcgttggattagctagttggtgaggtaacggcccaccaaggcgacgatccatagccggcctgagagggtgaacggccacattgggactgagacacggcccagactcctacgggaggcagcagtggggaatattgcacaatgggggaaaccctgatgcagcgacgccgcgtgaaggaagaagtatctcggtatgtaaacttctatcagcagggaagaaaatgacggtacctgactaagaagccccggctaactacgtgccagcagccgcggtaatacgtagggggcaagcgttatccggatttactgggtgtaaagggagcgtagacggatggacaagtctgatgtgaaaggctggggctcaaccccgggactgcattggaaactgcccgtcttgagtgccggagaggtaagcggaattcctagtgtagcggtgaaatgcgtagatattaggaggaacaccagtggcgaaggcggcttactggacggtaactgacgttgaggctcgaaagcgtggggagcaaacaggattagataccctggtagtccacgcggtaaacgatgaatgctaggtgtcggggagcaaagctcttcggtgccgccgcaaacgcattaagcattccacctggggagtacgttcgcaagaatgaaactcaaaggaattgacggggacccgcacaagcggtggagcatgtggtttaattcgaagcaacgcgaagaaccttaccaagtcttgacatccctctgaccggaacttaaccgttcctttccttcgggacagaggagacaggtggtgcatggttgtcgtcagctcgtgtcgtgagatgttgggttaagtcccgcaacgagcgcaacccctatccccagtagccagcggttcggccgggcactctgaggagactgccagggataacctggaggaaggcggggatgacgtcaaatcatcatgccccttatgatttgggctacacacgtgctacaatggcgtaaacaaagggaagcgaacctgcgagggtgggcaaatcccaaaaataacgtcccagttcggactgtagtctgcaacccgactacacgaagctggaatcgctagtaatcgcggatcagaatgccgcggtgaatacgttcccgggtcttgtacacaccgcccgtcacaccatgggagtcagtaacgcccgaagtcagtgacctaaccgcaaggaaggagctgccgaaggcgggaccgatgactggggtgaagtcgtaacaaggtagccgtatcggaaggtgcggctggatcacctcctttctaaggaaattggatacagtaggctgtgtaaacggctgaatcaatccaactaaaacggaaaaagtagagaaaagaaatgtgttttactgtttagctatcaagctgagatatttctggtgccgatgcggttgggggacacacccgttcccatcccgaacacgacggttaagacccaatcggccgatggtactgcactggagacggtgtgggagagcaggtgggcgccagatcaaaaaaagaaggacagggaaacctgatgagatagatgctggttttaccagtgatctgagagaaaaagctattttcctttcagatggctgataaaacatcagtcagcattgtaccttgaaaactgcatacatgagatttgattaagttaatcaaatatccttaaacgcaaagtattaagaaattaatgcaaacgcaaagataggaagacatcgatttatctgttatgaacagagtaatcaaacacatacgttacgaacgtgagtgtaaacttcgtgagaagaaagcacttactgtagtaacacgagaatcaagagaccgcatcacctacgctagggtgatgaagcgaaaggtcaagcaataagggcacagggcggatgccttggcactaagagccgatgaaagacgtgataagctgcgaaaagcttcggggaggagcaaatatcccgtgatccggagatgtctgaatggggaaacccgcatgagcagacctcatgcatccatacgccaatccataacgtatggaagggaacccggggaactgaaacatctaagtacccggaggaaaagaaagaaacatcgattccgtaagtagcggcgagcgaacgcggaggagcctaaaccggtgtgcgtgcatgccggggtcatggactgcatttaagattcagcgaagttaacagaacggttttgggaaagccggccggagagggtgaaagccccgtacgtgaaagcagagctgactgagcaggatccggagtaccacgagacacgaggaaccttgtgggaagtaagggggaccaccccctaaggctaaatactacttagtgaccgatagcgcatagtactgtgaaggaaaggtgaaaaggaccccgggaggggagtgaaagagaacctgaaaccctgtgtctacaagctgtggaagtactttatatgtacgaccgcgtactttttgtagaacggtccggcgagttacgcttactggcaaggttaagcacttcaggtgtggagccgtagggaaaccaagtcttaatagggccagagtcagtaggagtagacccgaaaccgggtgatctatccatgtccaggttgaagctgccgtaagaggtagtggaggaccgaacccacatccgttgaaaagggtggggatgaggtgtggataggggagaaattccaatcgaacccggagatagctggttctcctcgaaatagctttagggctagcctcggtgtgagtcttgcggaggtagagcactgaatttcctagggggcgtcaaagcctaccgaagaatatcaaactccgaatgccgtgtagatatcaccgggagtcagactgcacgagataagttgggcggtcaaaagggaaagagcccagacctacagttaaggtcccaaagtgcgcgttaagtggaaaaggatgtgggatttcgaagacaaccaggatgttggctcagaagcagccatacattcaaagagtgcgtaatagctcactggtcgagaggtcctgcgccgaaaatgtccggggctgaaacgcgccaccgaaactaaggaatctgaaaagattggtagaggagcattgcatgcgggaagaagcagtaccggaaggagctgtggactgcatggaagagagaatgccggaatgagtagcgagatagaggtgggaatcctctaggccgaatatccaaggtttccagggtaaagctgatctgccctgggtgagtcgggacctaaggtgagggcgagagccgtagccgatggacaacaggttgatattcctgtactgcagtatgacagaactgtggggacacgtaaggagagcgggagccgggaatggaaagcccggtacaagcgaggtaccagtcacataggaaaatccgtgtggcaatgggaagacgtgatgtggagcgaagattagtagcgaagcccgtgagccatgcgtcaagaaaagccgctatcgttcatattgtacccgtaccgtaaaccgacacaggtggatgaggagagaatcctaaggccggcggaagaagtattgccaaggaactcggcaaaatggccccgtaacttagggagaaggggtgcctgcgagagcaggccgcagagaataggctcaagcaactgtttagcaaaaacacaggtctatgcgaaaccgaaaggtgaggtatatgggctgacgcctgcccggtgctggaaggttaagaggagaggttagcggtaacgcgaagctttgaatttaagccccagtaaacggcggccgtaactataacggtcctaaggtagcgaaattccttgtcgggtaagttccgacccgcacgaaaggcgtaatgatttgagcgctgtctcggcaatacatccggtgaaattgaagtgccagtgaagatgctggctacccgcgccaggacggaaagaccccatggagctttactccagtttggcactggggtccggtgttgcatgtacaggataggtgggaggctgagaaacggtaacgtcagttgccgtggagccgctgttgggataccacccttgtgatattgggcttctaaccagccgccgtaaaccggcggtgggacaatgccaggcggggagtttgactggggcggtcgcctccgaaagggtatcggaggcgcccaaaggttccctcagaatggacggaaaccattcgaagagtgcaaaggcagaagggagcttgactgcgacaccgacgggtggagcaggtacgaaagtagggcttagtgatccggtggtattaagtgggaatgccatcgctcaacggataaaagctaccctggggataacaggcttatcactcccaagagttcacatcgacggagtggtttggcacctcgatgtcggctcatcgcatcctggggctgtagtaggtcccaagggttgggctgttcgcccattaaagcggtacgcgagctgggttcagaacgtcgtgagacagttcggtccctatccggcgtgggcgcaggatatctgagaggagctgtccttagtacgagaggaccgggatggacggaccgctggtggaccggttggcttgccaaagccatggccgggtagccaagtccggaagggataaacgctgaaggcatctaagcgtgaagcccccctcaagatgagatatcccattcttagtgaagtaaacccccttgaagacgacgaggtagatagggcagaggtggaagtgtggtaacacatggagctgactgttactaatcgggtgagggcttgaccaacaagccgaggaagcggacaggatgtaacagaaatggggcggaacaagcttgcttgtggagaaccatttatggtacagactgaacatttgcgaagcaaatgacatcgaacgacggagtcgtgagatgaccaccgctggagtatcggtacgcaggttagaattgattcaaagagtttgattaacgatcaacaggcatgtatgtagtttttaaggtacaaaccttaattaaatatttaagtaatcctccttagctcagtcggtagagcatgcggctgttaaccgcagtgtcgttggttcgagtccaacagggggagtttttttatgcctgtaaacaaggaattgtttacaggcactttttatatgtttgtataaatatccgttatatatatcgtaatatttgaccgaatcaagtaatcccctatagaatgttttctgataacagactggaaactatttcgaaatcatgctagaatgaaattggtttggttaagaaagaataatttatgagaaagaagcagaaaaatggaattatttgatatcatagatgaaaacggaaatcccactggaaagatcgtagaacggagtattgctcacgcagaaggaatccctcatcgtactgctcatatctggatcatccgtcggaggaatgaaaaaacagagatccttcttcagaaaagatccagaaacaaggactcctttcctggaaaatttgatacttcatctgcaggtcacatacaggcgggagatgaaccaatggaatcggcattacgggaactgaaagaagaactgggaatccatgcggaatcagctgatctgcagtttgcaggaaaattccccatatcttttgccagagaatttcatggaaaaatattccgggatgaagaaatcgcttttgtttatatttacgatcacccggtagagatcgatcatcttacacttcaaaaggaagaagtagaagaggtacagtggtttgatctggaagaaacgtatcagcaatgcagtcagcacagagataaattctgtgttccgctgggaggtctgcagcttgtacgtcaatttataaaaagtaacggcaatacaataaaggagtgaaagatcatgagaaaagatttcggagcaaagccttacacttatccacagccggtattaatgatcgctacatatggtgaggatggaaaaccggatgttatgaatgcagcctggggaggaatcagcgatgataaggaaatttccatctgtgtcagtgaaaatcataaaacaactgaaaacatcctgaaaaaaggcgcttttacagtaagtatggcagatgtggagcatatgacagcctgcgactatgtaggaattgtttccggaaacaaagagccggataaatttgtaaaagccggatttacagcagaaaaatctgaaaaagtagatgcacctattatcaaagagcttccaatctgtatagaatgtaagctgaaaagctatgataaagacacctgccggctgatcggtgagatcgtaaatgtcagcgtggatgagagcgttctggatgaaaatggaaacgtagatgttgcaaaagcagcaccgatcacttttgatccgttcaacaatgcatatatccgtcttggcgaaaaagtcggcgatgcttttaaagccggaacggcactgaaataaataatatctactgaaatacagaaagtctctttcacaggtacagataaaaaattatcttctggaagagactttctatttgttataaatattctttaattcagaactcccaattctttaaaagcctgaaaaatcccgtcctgatcattactctttgttacaaaagagaaatgtttttgcagctcagaaggtgcatttcccatcaaaactccacatcctactgcctccagcatttccagatcattataattatctccgaatgcaatagtactggtaagagggatttttcgaagatcacaaagatattttacagcttccgctttggttatgccgccagccatgatctccagaagagaatcggaagatcttgcaatagataatttcggaaaatatttgcgaagaagtgtttctgacggtgacatatattcagaatcgcacatacacaggattttatctaccataagtgtatctgagagagactgaagggatccctctatagaggtagtttccacaaccgtttcttcatggatcacatgagggtctgtccggtcttttacgatccagtcttctgaggtaaaaacattccaggtcacgtgaggacattttttttcaatcacatcaatgattttggaagcgtcggaaatgcttattcctttttcgtaaaggatattttgatcttcatccaggattagtgcaccactgaatgcaatggtacaacaatggaaatcattttttttaataataggacggatgccggaagggcttcgtgctgaagaaatagtaaatagaacgccctgatctgtcaaagtatgaatggcggaactagtcagcggagataccacatgttctgaggttagtaaagtgccgtcaatatcgctgaaaacagcctgtggcttaaatgaagataatggtttcatattcgagatcctttctgtaaaagatgagtataggtgtttctgtatataaaatagcacataaataacaaaataaaaatatatccagatttcattatgacaaagctttttttggagccagtgcagtatatgcctcttttggagcatcggccactagagagatcgaagcagctgtgaaacgctgcgtgtatgccaatgcagaggaaagctatcttctggcggaccataccaagtttggcaaaaaaatctcataaaatataatgatgtcagtgagtaccagctgatctttaccgatgaagaattggaaacggagcagaaaaataaagtgatccgacagggtggaagattttgtgaatagcaaaaatacagaaatctgttgacagaagataaatctgcagattatatataaatataacagattcacgaaaaaacctcggattattcagaaaattcatgcttgtaggtgaatataggatatgataacataaaaaatatcatttttgtaaaaacgcaaaaaaggaggtgctgacatgcgctcaatgagaaaaaatgtatacaggagagctatatcttcctaatgatgatgagatcatccaggatcagatcaaaaagctggattgactttatgatttcaatatgacacgtcccacacagttggataaaagaaaagaaatgctgaaagagatactacactatgatataagagtggaaggaatgtccggcttttgaaaaatcaaaaagaagcaggttgataggaacaggaatggatgaggacctgtctgatgctgaaagaaaagaggataaattatgggaatgaatgaaacaccgtcagcagaccgtgtacatatcggtttttttggcagaagaaatgcaggaaaatccagtatcgtaaataaggtgacaggccaggagctggctgtggtatccgatgtaaagggaactactacagatccggtaagtaaggccatggaactacttcctatgggcccggtggtaatcatagatacaccaggtattgatgatgaaggacatcttggagaacttcgcgtccgcaaggcgaaacaggtgttgaacagagtggatgtagcagttcttgtagtagatgccactgtgggaaaaaccagtgtggatgaagaattgatccatatttttaaagagaaggagattccatatctggttgtttataacaaggcagatctgctgaaaacaaaagatgggaaccggctttcttcagataataacttaaaccggaatacccatgcgggtgcggtcaaagagagcagtgtcagccagaaacaggatcatgaaaaccagaatacagagcaatctatttatgccagcgccgccaccggtcagaatatctacgaattgaaagaaaagatcgcttcgctggcagtaacggatgaactgaaattgcgtctggtaggggatctccttgaaccatcagattttgcgattcttgtagttcccatagataaagctgcaccaaaagggcgtctgatccttccgcagcagcagacgatccgtgatgtgctggaagccggagcagcagctatcgtgatcaaagaggatgagctttccaatacactggaaaccctggggaaaaaaccaaagcttgtgatcacagacagccaggtctttgccagagtcagtgaagaaactccagaagacatctggcttacttcattctctattctgtttgccagatttaaaggaaatctaaagacagcggcagctggggcagcagcactggaccggctgaaagacggtgacaagatcctgatctcagagggatgtacccaccacaggcagtgtgatgatatcggaacagtcaagcttccacgctggatccgtaattatacggggaaagagctggaatttgagtattcctccggaagagatttcccggaggatgtgacgaagtacagtctgatcgtgcattgtggcggatgtatgcttaatgaaagagaaatgcgttaccggcagaaatgtgcattggatcaggagattcctatcaccaattacggaattgccattgcctacatgcagggaatcctgaaacgttgtgtggaaatgttcccggatgtgaggaaagaactggatcagtaatttttttcaggtgtttacatttttttcgaaaaatgatatagtagcgattgttcattttataaatttgcaaaaggtgatgataaggagttgcagatacaatgatcgatcagacactttcacaggccctgcagaaagaaattccaatacttacagctcagatccgaagtctctatgcagaattcgataaaaaatttcatcttaacggagcaaagatccctataacttttggcatggagccggatctgctgggatcttatacaagaggcagctgccacgaaaaagagcatttccatttttctctgctgtttatcggctatgcggtaaaaaatcctctgaaaaaagaagaccgactggatctttacaaacatgaatatgcccactatatgcagtataattttcacattccctcagagtatcagtggcagcacggaacccacggaagcgcctggaaatactgctgttccctgactggtgcggcaccaacgccatattataaggcaggggaagctctgatgaaacacaactatgaaaaaaaactccgaagcccgatccatgaccgtactgtaacggtgcgggatacttacagaagagagcagcagcacaggaatactcagaacagtattgtacgctatgagatcggagaggatgtcagtcatccgaaattcggaaccggaaatattgagcatgtagagcagcttccgggttctgtaaggcttcacatccgttttggagaagagctgaaagtgatcgatcagaaatggcttcttcggacaaaatataaaaagagctgaatatagttttataaaaatagacatcatcctggatatcaaaatagatatcatatggagatgtttattttttttatatcattgatacagtataaaaaaattctccggtacagaaaatctgtgttccggagaattttaagtcaggcggatatttgcgatccgtatttagccagttgcctgattcggttaaaaaaatcagcttatattactcagaaaccttcacaaactggctgttataaagattctgatagaatccgccttttgccataagctcttcatggcttccctgctcgatgatgcttccgtctttcatgacaagaatctcatctgcattgcggatggtagaaagacggtgtgcaacgataaagcttgttcgtccctgcatcatccggtcaaaggcctcctggatcagcatttctgttcgggtatcaatactggaggttgcctcgtcaaggatcagcatcggcggcagacacagcatgacacgggtgatgcagagaagctgcttttgtccctggcttaaactgtcttcataaagaatggtatccaggccatttggaagacggcggataaattcccagctgtgggacattttagctgcctggatcacttcctcatcggatgcatccggctttccgatgcagatgttatcacggacagttccatgcttgatccaggtatcctggagaaccatgccatagcttccgcggagggcatgtctggaaacatcggtgataggggttccgtccacggaaatacttccaccggtgacgtcatagaaccgcatcagcaggttgataaaagttgtcttgccacaaccggtagggcctacgatggcaatacgtctgcctggttctgtatgaagattaaagtttttaatgagaggtttgtccgcttcgtagcggaaggaaacattccggatatccactgcaccttttacatcgacaagagttccggacggatccgggctttccggctcttcctccagaagatcaaagattctggtagcgcaggccagagcgttctgaagctctgtgatcacggagctgatatcgttgaagggcttcatatactggtttgcataagccagcagtacggaaagtccaccgacagtcagatgaccgcccgggatcagaaaggcacctgcaagagctacacctgcgtaaatgatgttgttgacacatcgtgtggacgggttggtgaggctgctgtaaaaaacagccttctggctggcatcacggagtttttcattgatcgcagcaaaacgttcggaagaacgattttcgtaaccaaaggcctgaaccactttctgatttccgatcatttcctcgatcagtgcagtctgacgtccacgggcatcactctgcgcacggaacatctggaaggaatgggaggagatgaatttcgccacaaaaaagcttacaggtgtcaggacaatgatcatcagagtgatccacacatttttggagaacatgaagagcagggttccgatgatggtgatgataccggaaaacagctgtgtaaatccaaggagcataccatcggaaagaatatccgtatctgcgatgacacggctgatgatatcaccggtgctgtgtccgtccaggtaggacagaggaagcttctggatatggcggatggatcttgcacggatatcctgtactgtgcggtaggtcatacggttgttgatgacactcatgatccaggtggcaatgccggaaaatacgatcatgacaagaatacgggaaagatagaatcccattcttgtaaaatcaacttcgtgggcagcaacgacctcatcaatggcataaccaaaaagtacgggaacatacagctgcaaaattacagtgactgctgccaggatcacacttaatacgagaagaaaacggtattttccaatgaaacgtagtaccttgaaaaaggttgccatgctgtttttgcttttggcggttgtatctgttttactcatgccaggacctcctttccagtcgctttttcatatttggtacgctcttccgggaactgtgagaaaaagatctcacggtaggttttacaagtagagatcagctcctgatgggttccttttccggaaagctgaccgtcatccagtaccaggatcagatcggcctggcggatgctggcggctctctgggataccaggaaggtggttgtttttccaccaagctggtgaagggatttccgaagtgccgcatctgtggcaaaatcaagagcactggcactgtcatccaggatcaggatctctggttttttcacaagagcgcgggcaatggtaagtctctgacgttggccaccggaaagattccggccgttctgttccagacggaaatccagctgaccgtcctttttctctacgatttcacgagcctgagcagtggtaagtgcttcccacatttcttcgtctgtggcatcttcccgtccccagcttaagttatcgcggatggttccctggaaaagtgctgctttttgaggaactacgccgattttttccctgagtttctgcctggaataggtctgtacattctgaccgtcgagggtaatgactccggaggttgcgtcgtagaaacgggcgatcagatccacaagagtggatttaccgcttccggtaccgccgatgattccgatcgtagagcctttttttgcggaaaaagtgatatcagaaaggctaggtgcgccggttcctgcataggagaaacttacatggtcaaaagcgactgcatagtcactgctttccacagtcggtaaggaagctttgtccgggtaagtcatggtggaatcgactttcaggattccggcaacgcgatccgcacaggccatggatttgttcagggtgatgatcagggacgcaagcttgatcagttctacgatcatctgtgccatatagttgtaaagagcaactatttcaccctgctgcatgtttccgaggtttacctgtacacctgcagtccggatcaggattactgttgcgatattgatcagtacataagttgcaggatttaaaagtgcagagatttttccgacaaattcgttcagtctggtaagtgcaagattgatttcgtcaaactccgcaacggcatcagcttcacggcaaaatgcacggatcacacggacaccggtcaggttttctctggtaagacgggtgacggaatccagacgtccctgtacttttttgaaaagcgggatacttaaaaacatgatcacaaagacaaccaggaacagtaccggaatggcaactgcgaagatcagtgcacagcgcacattgatggtaaaagccattaccatagagcctagaacaataaacgggcttcgaagaagaagacggagtcccatgtttactccgttctgtacctgattgacatcgtctgtaagacgggtgatcagcgtgtcagtgccaagggtgtccagctccgtataggaaagcttctggatatggtcaaatacagcctgacgcacttctgtggcaaagcctacgctggcttttgcagcaaaaaactgtgcagtaatgctgactgcaagtcctgcagcagccatcagtatcagaataaaaaacttctgaacgatatagccgtggtcattatttgcaattcccacatcgatgatctgggcgatgacgacaggcaccagcagatcaaatacaacttccagaaacttgaaaaaaggagccagaacgctttcttttttgtaatttcgaagatattttgcaagtgttcgcatttctttttcttcctccgtttccttatttttctataataaacctctgttattatactcctatggagataatacgtataatattgtttttaatgtatgataatataattttgctattgcctgggacggaaatctgtgggatgatagaagtatggtttttcgtataattgtgtgggaaagatattcatagtatttacaaagcattgcagatatagtatttattaaccgaattaagaaagtactctgtgggacagcgaaaagcaataagcagtagatgggttttgcctgtgttatatatcagataaagaaagaaggatttatatatggaaatcagacagctggaatattttcatgagatcgcagcaacaggaagcatcaatgaagccgcaaggagactgaacatgtcccagccgccgctgagctatcagatcaagcagctggaagcagagctgaaggtgaagctttttgagcggaccagggcaggcgtgacactgacagaagccggaaagcttctttatgacaggacagagaacattttgagctacgttcgttccacagaactggaagtatccaaagcagggaaaaaacaggttttacgtatcgggatcacgccaaccacagtgaccaccattatgccttatatttccagattttccagggaaaattgtgatgtaaactttgaggtaagggatgcgatcacctttacacttctgaattatctgatggatgggatcattgatgtttcggtagtgcgtacacctatcaagctggaaggtttaaattatctggaactggatgaggaacccatgatcgcggtccttcctccggagatcccggaaaatgagacaaaaaaagagggcatcagccttaaagagctgactggatgccctctcattatttaccggcggtacgaagaatttctgatgaaagcctttggagaaaaaaatctccagccggatattttctgtgtctgcgatgatcccagagacgccatgctctgggtgcaggaaggtcttgcaaccgccgtttttccaagatccatggaggatctctgtacagatcttccgatccggatcattgaagaagagaagctgaagaccaggatccttcttgcctggaaaaaggatcgcaggccttctgccgtgatgcaggattttatcaatatctgtgagaaatatgcaggaaaccctgcaatctgatcatggacctggaaaggggatgtatgcagaaatcagtctttgagatgatcttccttccagtgcttccatttctgaacagcttccggattctgcttttccagccgttcttccagctttttccggcgctgttccagtcgttccaggacttccggatgctcggcaaggattttttctttcagcttgccacggcgcttttctagaagatgaaggatcagtttccggtcggaagttaattcttcaggcagctcatccatatgtaattcaattcttcgaagcagttcatcctcatccagaacacccagcccatgccagttatccagaagctcttccagaccttcttcggagagacgttggatatccgggatctgatgcagctgttcaataatgtgatggacagattcttcgatctcttttactgcatcatcaccaaaagcccaggcgaactcttccagggtattttcttcctctgccggaagaaaagcgatactgcggcgcagaagctttgtctcgtcttcctttggaacatccagttcataaggggcttcgatccctgcgtcatgcagagcagcaagaatggtacggcggaccataccgtccttgatcatatgaccgatgccgaactgacgcagctggtcattgatctgggtggaatgctctgtgaggtaaaaacggatcccacgttttttcaggcttgcggagatggcatccagacggtctgctgctgtgacatcaatgctgttgatagcactggcatctacgatcactaccctggtgtcttttcggatgctgttctcaatatcttcctgaaaaatctttatatttgcaaaaaacaggttttcactgaaacggtagatcacaacgcccttaatagggtaggcgaaacggtttttggacagatcaaaataagcatctcttccagggatcataccacggaaggagcgcggcgggttggtggccttcaggatcacagctacgaaagagagcaggataccaatgataaccccataaatggttccaagacagagcacactgaaaccggcagccatgaagatgtagaattctgtacggcttactttgaaaagacgtacagccagatgggtttccaccacatccatcagagcagagatcacaatggctgtcagtacaggaaccggaagatatccgataaaaccggtgccgaaaagaaggatcagagccatggtgatcccggcagtgatggaaaccgcctgagattttccaccgtactgttcattgagggaggtgcgggagatactgccgtttaccgggcagcagcctactgcggcggcagcaatatttccggcggcacaggccaggatttcctgacggtcgttcagcttataatcattgcggaacgcaaaggtattctctgcaagaagagtttctgccataatgacaacagcaaccataagaccgcggcctgccgcctgggtcagatcaacatttccgaaatccgggatcaccagggagggaagtccacgttctacagactgcaggaggactacgcctttttcgtccacatgaaaaacaacggtggaaagaacacccagagccataataacgatagccatggggaatttcggcgccagctttttaaatgtgcggatcagcaccagagcaccaagccccatgaagagggaaagccagctgatatttttggcagcagcaaagatatgctctgccagttccaggagctctccggatcctgcaggacttcccataagtttcgggatctgcatcaggatgatggtaactgcgataccgctgataaaaccgcccataacaggtgtggagataaagtccacgatcttatctgcgtgaagcagaaagaagataaacagccacagacctgcaaaaagtgcgatggcaggaacataatccatggcagcttctgactctgcagcaatgccaagagtagacagtgcaccacctacaatggcagcaggtgccgcatcaactccaaagataaactgtcttgaagtggaaaatagagcaaacaaaaggatcggcagaacagaaccgtacagtccgtataccgccgggatcccggaaatctgggcatatcccatggagatagggatggaaacagctgctatgatgatgccggagaaaatatctttgggaaggtattccttccgatatcctcgcagcgtggaaaacagggaaagcttcatatagtcacatccttttctgaaaaatattttctattatataccaaagagagcctgcaggaaagaagcaaagcaaaggttccgggtgaaaaatcgtggacaaagaataactgccatattataataaatgcgaaattgcagtaaccgtaagagaatacaggctgcaaagctgagaaatcatcaatcatcaggaaaggttaagatataaatgaaaaaagcgatcatagcaatgagcggcggtgtagacagctccgtggcagctcttttgacaaaggaatccggtgacgagtgcatcggcgctaccatgaaactttacaacaacgaagatatcggtgtccacagggaaaagacctgctgttccctggacgatgttgaggatgccagaagcgtagcctatcagatggatatgccttactacgtgtttaattttaccgcagatttccatacagaggttatggacaggtttgtagatgcctacgaaaacggctgcacccctaatccatgtatcgactgtaaccgatatctgaaatttgataaaatgtttcaccgcatgcaggagatcggctacgattatattgtaaccggacattatgcaagagtggagtacgatgagaaacgggaccgctaccttctgaaaaaagcagcggacgatacaaaggatcagtcatacgttctctatatgctgacccaggaacagctggcacatgtaaagcttccgcttggaggtctccggaaggaccaggttcgtgtcattgccgaaaaacatggctttatcaatgccagaaagcatgacagtcaggatatctgctttgtgccggacggcgactatgcgaaatttattgagaagtacacaggcaaaaaaacaccggagggtgattttgtagataaagagggaaactatatcggacgccataaggggatcatccattacacgatcggccagcgccgcggccttggcattccggcggccagccgtctttatgtctgtgagatctctccgaagaccaatacggtagttctcggggacaacgcagatcttttcagtagtgaactggaggcagacagtgtaaatctgatctctgtggactgcttagctgagccgaaaagagtgactgccaagatccgttaccgtcacaaagagcagcctgccactgcatggcagacaccggatggcatccttcatgtgaaatttgatgaaccgcagagagctatcacaaaaggtcaggctgtggtgatgtatgacggagatgaggttgtaggcggtggcgttataaataaaatctatagccagtcataaataaaggtgagaacctaaatagataaaccccattgacatactaggaaaagggtgatatgattgcatcatcaaaaaacggagcacacaaaacaaggtgagcaacgtgatgattaggaggaaatcatgaaggttttacagaagtcaacaagggtgtttatcgaagaaaagcgaatgtgttgttgtcgctgataagcagatgattataagataagcaattactattttaccgaatataagaataaaagaaaagaggacaaacacatgagcaaaattacaagagatcagagaaaattcaaatttgagacattacagcttcacgtaggacaggaacagccggatccggttacagatgcaagagcagtaccaatctaccagacatcttcctatgtattccgcaactgcgatcatgcagcagcacgtttcggacttgcagatgccggtaacatttacggacgtcttacaaacccgacagaggacgtatttgagaagaggatcgcagcacttgagggtggctccgcagcacttgcagtagcatccggtgcagcagctatcacatacacgatcgagaaccttgcacagcagggagatcacattgtagcagccaaaaatatttacggcggtacaacaaaccttctggagcatacgcttccggcatacggaatcacaacaacatttgttgatgtatttaatctcgaggaagtggagaatgcgatccaggagaacacaaaagctgtttatattgagactcttggaaacccaaattctgatgttgtagatattgaggctcttgcaaaaattgctcacaaacataaaattccgcttgttgtagataatacatttgcaacaccatacctcgtaagaccaattgagtacggcgcagatatcgttgttcattccgcaacaaaattcatcggtggccacggaactactatcggtggtgtgatcgtagagagtggtaagtttgactgggaggcatccggcaaatttgcatctcttacagagccaaatccaagctatcatggcgtaagcttcacaaaagcatgcggaccggcagcatttgttacaaagatccgtgcgatccttctccgtgacacaggagcaacaatttcaccggtgagctcctttatcttcctgcagggacttgagacactgtctctccgtgtagagcgtcatgttgagaacgcactgaaggttgtacagtatctgaatgatcatccgcaggtagagaaggttcatcatccgtctgtatccacagatccaagccagcaggagctttataagaaatatttccctaacggcggcggttccatctttacattcgagatcaagggagatgcacagaaggcaaaagatttcattgataaccttgagctgttctcacttcttgcaaacgttgcagatgtgaaatcccttgttatccatccggctactacaacacacagccagtgcacagaggaagagcttcttgatcagggaatcaagccaaacacgatccgtctttccatcggaactgagaatatcgatgatatcatccaggatcttgatgaggcattcaaggctgtccagtaaataagacaattaaataagaagaataccttctgaaatcaatagcgcagaaaaatctgctccggaacatatgagaacatagtcccggggcagattttttgtgtgcttatctggaaaatccaaaaagcgggaagaaccgtgttgatggcactgaggatgcatggatcatgtgcgatttttttcaggcggatcctgatgctataagttcctccaatgttccgaagctatagcccatctcttcccattttgtcagcagctcatccagaatagaagcattggtggaagaggtgctatgcagcagcacgatggcacccggatggatccgtcccagaagcttttcaaaagcttcttctttcgaaggctgcttatcctgataccagtccacataagccagactccagaaaaaggtgtggtatcccatctcttttgccatctctaaattttccacgctgtaaatgccctggggcgggcgataaaattttgtcatttcttttccggtggcttccttataaagaacctccacatcctcaagctgcttctgaaaggcttcctttgtggagatgccggacatatccgggtgtgtcatggtgtggttgcctatggtatggcctgcatctacgatctcacggatcagttccggtttttcacggatcagtgttcccacaacaaaaaatgtggcatgtacctgatgcttatgtaaggcattcagaatggcaggcatatttccattgtcatagcctgcgtcaaaggtaagatagatttttttctcatcggtatcggctgcataccaggcattgtatttttttaattcttccatagaagcatttcctgtgggccgtttgccttcttcctgaaaaccgagcccccagttttcattttggaatgtcatagaggcagaagaggtctggctgttttcggcagaattcggatcggaagtaaaatgagaatagatctttcctacaagactgccaagagcaaaagccatgacaaagaaaaaaataagacggtagatgtgtttttgtttcatgggaacctcagagaaagtggagttattaatatgtttatgaacacagagaagaagatatgaaagcagaagatcatgagactatgtttgtaagaaagggataaaaataagcaaaaaataagagccatcagcgattgatttcttctgccgatgactcttttaattttcattatccaatggaatatacctctcatttcttagatttaaaacttatacggaattaaaatttacattctcggtggtccatacctccttgttttaattatgatgggaaatctttaaatcttctggtggactgtacctctctttcttagattatgggaagtaagttatgttttcggtgggttcacgctcctttttgatttagttttttgctttccgtttgttttatttgatgattaaactataacagataaaatagatattgtcaacactaaatttgaaaaataataaaaataaattaaaaaagaaatataatagcagccatacatacaaaataatcagataatattaaagcgccaacaataaaagaaaaataaatagatgttttattaatagcgcaaaagaatgacagattcaaaggtatttccatagtcatgccattgccagcttccgtcatacttgtggcagatatcttcaataatagaaagtcctaatccgtgattaaaagaatctttttttgtagtagtatgatcaaatactgtttgcggatttttactatttttaaccaggatagaaataaatcctttggaggttgtcaaggacagggaaagatatggttccgcagattcagaagaacggcatgcttcaatagcattatctaatatgttaaataaaacactgcataaatctgaggactgaatatttgatttttcaggaagaaaaatcttgtagtctgtatggatacctaaatgctgagcaaacagtcgtttggattccagaatggcaagaataagattatcttcgcaataaggatgaaagcggtcacgctggaaagcttcaaggacctcgtaaacgagtttctgagcattttcgcaatcattttcatgcagaagtttttgtattgactggagattttctgaaaattgtttctgggctttaagtgaggtggattcctgttgattcattaataacagatgttcagagtttaaaagttgttgcttttttaacagattaagctcggtctctactttttcgcttgtaaaaagctgcattaaaagctgatataaattgtaacataagatagctgcagtcaggcaggtcagtaaaaaaaatgaattcaaatatcgtccggtataattagacagaaaataaaatatctgaaaaaaagctaaagatataataaaaattattttttgtttaaaagtcataatatcgaatcctcctgattgagtgatttacagactgatgtatgattattatggtctatgttattgcttaacacagaattacaatatttttctgctgcatctgtttttttcatatctataagataagctaacgaaaacagatggttttctatatcatgattccatttgcggattttaatgtattcttgtttcatttcttctgatacttctatttgtttttccagtaattccattttatggagattctgtttgaaatttatctgctcttgttctaaggatttaagaccatgtataaataaaagaaaacttatacagcaacaagtgatatataaaataacaggaataaactggttactgaatttataatgctgtaggaattctattgcaatcaggggcaggaaaataggaagaataataaacagcagtaaagtaaacttcagataatttatacattcccgtaaaagagagaaaacatttttataaaatagataagcaaaagaaaaaatgagcaattgtatgatcagtttttcatggaaagtgcatagagaataaatatttattgcagtatatgtatgctggtgaataaaccggttgtaaatttgtatgtaaatattcaatgccagaagttcagttaatatactgataaaaagaataataaagtaagctatcagcttttttttaatggagcctttgaataaagaaaaaagattcagaaacatgactatttgtgttaacatcgtcatttcgttattgtgtccatatattttgatcatatgaaaagaagacagtaaaacaaaacaaactaaaatatggacaaaagctttcgcttttgaatttattcgtctgggaaaaagctgcatgaaacaatatacaggcatagttgaatgatatgcagcaataagcattgcaaataacaggttttttaacattacagaacctcacttgaatttcggagtaacaattgtgcaaaggcatctttagttgcctggtaatagtttcggcttacaggaatatgggttccatcagaaagttcaatgccagcatggctgaaagtatgtatggtatttatgttgaccgcaaaacttttatgacatatacaaaaatcaggttttaattgttcgataagaatcggaattttttcacgacaatagtaaatctgcgatttggtatgtatttcagtatttcgtagttttcgctccatataaaaaatatcggatcgaaggagacggtaatctcgggactgataattaaaacaaaaatactgttgacggagtttattcagtttgcggcaggaagcagaaagtgctttaggaagatattcttccatttgctgtttataaacaaaataaatatgatctgtttcataaacagaagatgcatattgcagatattggctgataaaaattatctgtgtattcggatttaataaattgattctctgagcaagtttgattccagacacagattcagatccaagttcaatatccatgagaataatatgataaggacattgctcattggaaatttgattgagaaaatcagtggccgaagaaaaggtatcaatttcgactggaatttcaagagaagaacaggataatgtatgaatttgtctgcattgaatgtcattatcttcacatattgcgagtttcagcataggaatctctccttgaaataagtgattttgaaagtattataacacaatttttcaattgatagtaaaaattcaagtaaaaaatctatgataaatgaaaaatttaaaaaactgatgcttgtagaaatagtaaatggttaattatgtactttactatgtctgtttatgcaaatgactaaaaaaaagaaaaaagtatggtaaaattaaagttacaaaaattcatcatattaggtattaggggggaagagaaaatggataaaataaaaagatgtttgcaatgtggaagagaggtgtctcagattctgtggacaatgtggtaagagagtaaattgagaaaagggaggagcgattttatgtattcaaggatgaaaagaaaatgtagttttatggtactagtagtaatggtagttagtctgataaactgcgaagcagttatccggttatgaacaagtagcgaagcggattgcgaatatccgcttgactagaaatgagagagaaaatatgagaaaaatcaagagcttttgttggatgcttttttttactttcaatagttatttcaacaaataagacagaagcagcagtacaggatactaatgaaggtacattgaatgttcaatgggaagatgaaaactttggtgagtcaatttgcaatgctttgaaaaaagaagaagtcacatatgcagatattgaaggaataacaggcatcagtatcgattcgcagtatgtagtgaagttggattggaaagataagacagaagaatacgtttacaattcagggaatgatatgtgtgaaatacttgaattgcaagaattttctacattagaggatttaaagaaatttccttatcttcgtgaattatgtctgaatgaatgcatagttgatgataatactgcattaggagaattgactaaattagaaaacctgaagttggatggatattccatagattcccttgatcgtttgaaaaatctgactgcattaaaaagtctgatcattcagggtgcggagttcgaagatttacaggcattaaaagaattgactaatatggaagaactaaggctgcctaataatgatatcaaaaacatcgatgccttggagaaaatgacaaacctggaagaagtcatattatacgggaatcgaataaagaatatatctgcactcagaaaactctgcaaacttagggtgttaaaactggaagggaatctgatagaagacgtagaaccattaatgaatttaaaaaatcttgagaaattaagcttaggggataatccagttaaaaatgtacaacttcttgaaaatcttacgggaacggatatagatttggagtgactgtagaaaaagaaggagattatgtggatttgagtacagataaaacaccacactatggagttgtaacaagagtaattgattcgaatagttttgaaaccatagagtgtaatatatttggagctccttgcaaaattattgcaatgacacgccggaaatccgatgagagaggtatagttcgttctacgaaagcaagaggatgattaagggagggatatgatgagaaagattaaaaagtattttattataatattactaactaagacttcccacaccaataaagtgtgttgaaccttgaaaattcaatatttcagccaataaaaaggcataaatacgttccatttgctataatgaaattgccaaaaaccattttcgcaaaggagatttatgccatgtccattatagcacagaacaacactaacgagatagctctacttgactgtatccagagatttttttcaaaacaccatattggaaaactactggctaaatgcaatggcacgaaagaaaaaggtgtccctgccatttctcttttgaggtataagcttggaaatattttcgtagggcgaagtatgtatatgcagcaacgcagtggatccttcaaggaaggattctctaaaaataccttttaccgtttcctgaattccacaaagacaaactggcttcgtttcacttctcttcttgcggcagatattgtcaacaatgatctgaagaatcttacagatcaaaagcgcaccaatgtctttattgtagatgacagccttttcaaccgatccagctgtaaaaagacagaattgggatcccgtgtttttgatcatacagatatgacctataaaaagggataccgtatgcttacactcagttggagtgacgggaataccctgatcccggttaacagctgtctggtcgcatcttcaaaagagtccaatgtcatcgggcctgttcatacatttgataagcggaccattgccggaaagcgcagaaagctggctcagaccaaagcacctgaagtaatgctcacgcttcttgatactgctacatcttccggattatcagcggactatgtcctgttcgactgctggtttgccaatccggcacagatcacagccattaaatccagaaacatggatgtcattgccatgatcaagaaaagcagccggatcaagtacggatacaagggtgaacagcttaacatcaaggaaatctattccagaaacaagaagcgccgcggcagatcgaaatacctgctttccgttgatatcatgctcgggaaagagaaccctttcccggcaaaaatcgtatgtgtgcgaaacaaggcgaatcgcaaagactggcttgcgttcctctgcacagatccggatctttctgaagaagagatcatccgtatttatggcaagcgctggcagattgaagtattcttcaaaacctgcaaatccatgctgaatctgatcggggaatgccacagcctttcctatgatgcactgactgctcataccgcaattgtttttaccagatatatgttacttgctctggagcaacgtcaaaacgaagaccagagaacgcttggagaactgttcttcttcctggtggatgaaatggcggatattagcttttcaagatctctttgcattctgatggatgctttcatggcaagtcttcaggagatattaaagctcagcgagaatcagctggcagcatttactgctgattttgaagctcgtctgcccgaatatctgaggagcgtgctccatcctgtggctatagtagcataaatcgctattttgttagctgaaatattgaattttcaaggtgcgaagcctatttaaggtatgggaagtcttagttactaagtatattcactttaacaactgtagaaacttcatcactgaattttagtgcatatatcgttcaggcaaaggcttcttcttcgacgaagagaaaagctcaagaggcatatcgaaaatttctgacgcaaaggagatacagatattttacattatgggatattgataaagatggcttgaaagaacttcttgttaccgatggaagagagcgagttggaaattcaccgaccaaagcatatgcatatacttatacacggggaaaactgagatatgcaggtgagattgggagtcctatgtcagggataagctataattgtataacaaagcgtttgcatgcatcttggggtggatgtggaaatgttgaatattggtattataccttgacaaagaataaaaaagtaaaacaggtaatatgcggtgcgtatgtaaatggagtaaaaaatggaaatgtacaatacaaatgtttatataacaagaaaaaaatttcattaaaaaaatggaaacagataactgataaatggattaaacaaacaagcactttgaaatattatagaaatactacaagtaacagaaaaaaacatatgaaaatgtaaaagtaataatcacagtaaaatagggaagaggtgcaaattacgctcaaacggaatgccagttccgctactgcggaacggctattccatttttaacggtacgaagtaccgctagatgatatcattctgtttcacgcatatttataccgttcatctccagacgatatgtatgatgtttatctgtgattcgtgtaaggcacgcatcagcgtaggtattatcagcaaacatatcaaaccatgtactgactggaaacggtgagatgactacagttgattttcttccatccctggtgtcaaggatttcaaaaagattccggcatttatcaagattgagatccataaggccaaaatcatcgatcacaagaagatccagcttggtcagcttattcaggtaatccagatttgtggatttgatacgtgcctgttccatttcgcccataagagtgttcgcttttatatactttacactcttaggctgcttcattgcagttacacaaaaagtattgattgaaacaatctcaaaccctcagcagaactggggagactcgtggacacaaggagcgataaatgtagtatcaaattagaatgtgggtctagcaaaccacataaaagacaacggaggtatccatggataatcaaagtttagcacatagtaggtatatacgtaccatataagaagtgatgtctttattgttagtagaagcaatacaggcaactacaaaagtcttgtggatatcaatgccacagcagattttgtacacgatttttaaagtcatagggattcctttcggaaccgtgaggttcagagaattatagggagtaacggcattgactgaacgcctaagccataaacgagattgtttatacaaagatgagattacgtgttcaaagtcacacttatttgtgcttgaaaaggcggactacacatataaaaatacggtcattcgacaatccggacagcccactcacctccccgtgatttgtagtatatcgagatccctataagaagaattataaggaaaaaaactcaggaaaacattttcataacgttttttgcctgagtgaagcgaaaggaatggatataaatatgaaaagaatagtacaaatatgtttgataatgacaggaattttttggggagtttttaatgtttatggatcttcgacgtatcagattctaaaagatcaacaaatcgaatttacggatattctggtagagggagatagtttagttctggtaagaaatgaaaaaaatggtttttcatcagaaggaatatatttaggtgtgtataactgtgttgagagaatgtggactgtagaatatcaggcctatgatgaatatttggaatcatcctattatgcaggagatggaatattcgctttgtcggatggagagaccactacgttattaaatactaagacgcaggaatttttgaaattggatataaatgttaattttaataatcttcatttttataatggatgtgcggtgagcggagccagagaatcctatggagatcaattgtatggaatttatgaaatcgacgaagatggaaattaccaaaatacaggtattacagattttattaccgaggataaaatattgagacctgatgattttgaatttgtatatgcggatggaaagcaggctgtttatatttatgatggggaagagttttatatatatgatgttgctgcagcagaagtttacgacatttacaatccggattatgctgataagttctggcatgggtggtctgatacattaaaagtaagtatatgtggagaaaaatatctcgttcttttaaatatggaaggtactgacggacaaaattattatgcggttatggatttttatggaagtatgattacggaggcaacgaaatgtgatttggcaatagcaacggaaaaaggaaacattgtagtaaaaaacggtgatggattaaatgagattgagcttgctaaattggaaacaccagaagaacagtcattaaatttgatgcctttattggaaacaaaccgttcttggagaaatgagcaaacggctggaatggatattcagggaaatacttatggaaatgcaatagagtattcttttgtcactgatccgtttggtacagaagaatacagtacgtgcgatgcgtggtatttaggagaaaattattcaagacttacgggaacctggtattttcctgcagatcagattcaagatggatttgcacatataagattaataggcgatggaaatgtaatatatgataattcagagttaaatgcagataattgtcggatcgattttaatatagatgtaagcggaatcagagagcttagttttgaatataacgggatttgtgatatgacggatattttgtttggcatgtctgatgctaaattatgtagttgagagatttttaaataaatgataaaggggaagagaaaatgacaaaagttaaaaggtgttcacaatgtggaaaagaagtgtctcaaggtggttcgttttgtccgttctgtggaaacattataaatgagaatgtgaagagtgaaagtagagaatcagctatatatgggttagatgatgatactcaaaagaaatatcaaactgatataaataaaaaattacaaaaacaaaaacatctggaatatcaaaaagaaaatttattaaaaaagaaaaagagtttgggactgaaaattgataattacagcaagattatacaaaaagagattccgagttgtgaacgaaataaaacggcaccgaatatgccagttataaaaattgagaattctaaaatggacgtcaaatggtatataaagtggtttttcagcatacagtgattattctgttgatgaactgcgtagtgcaagattcgcgaattcgaatatggtgatgtgtatagaaaaaaatatcgggaaaaatcatcagtgctgctgtggacaggtgtattccaataaaaataataaatgcccgctttgcggaaaggaaagaagggataagtagtatgaatgatacagaatatagagaaagatgcaaagagttagaaaaaatatacatatgttagaatctgaagtcaatgtattaaacaatgaatgtgaaaagttgtcggatttaaaagaaaagagtcgaaatagtctgcagatgtcttcttttgggaataatccgatatttgtggaaaaagcacaagttaatatggagaaagaaattccaacaataggtaaatctcaagataaaaaaactgaagataaaggagaaaaggtatgaagaagaaaagtgctctgtttttattgctgattggaggaactatgctatccggatgtattggaaatccaaaattagaagaggatactattggggaaattattagtgaaaaagatccagtatatgattatctgcagggatatgtggataatgtgtccctagtaaaagaaaaggatgatggcgatagcaaaacagtatgggtaaaaactacaaccgagtttgataattttacatatgaaggaagttacgtaattgactgtggcttgtattccaagaatggaaataaggagtgggacgtgaataactttcaaattgattatgaagacatacgttttattccaacgcaatatgattatacgggaacttggatgtctgaaaatgcagaatattgtttttatatgaatcaatttgattgggagaatgggaaaataggagcggtcgacgaattactattacaaaatttttccagagatttaataggatatattgatgatagcgataacattttacattttggtatgaagactcgaaatagtgatgagcttaaactggattttaatagtgaaaaatatgatgagaactatatggtaatacaggcatttgatgtgtatcattttggggaaaaatgttatcacatttcaaatgagcaaatggggatttctggaatcacatatacggatttcgcatcagaggatggatatgaatatcgtgatgaagattataatatggcgaattgtctccaattaaagacaaaagatggagaaatggttttaaatgcttcggctctgttatatagttgtggcggaacatcggaggtttgtgtggatgaagatgtgaattaccaattagattttgcgtacgatatagaagattatatgcgaaactttattgggcaggaattagagttatattcgtttgatacgaagcttacaacattatctttttcagaagaagatatatatccttttttttcatatatttattccgaaagcgaaaaagataaagtggaaaaagcgtattgcatgtcaaatgctgtagatatgtattgcaagatttttaaacctgattattaatagacaataaattagctagactaatgccttctttgtaaacggcaggttgcaaattgacacaaagttttttaaaaaactgttctacatgaaaaatttatgtattttcgttcagatattttagaaactctaaaattacgtatcaaattcgaataaatcttcggaacaatacttattttttaatatcgtgatccagtagtttgccattgaaaacataaaaaggagaaaaaatatatgattggtgttttagggggactatcacttacagtaggtctgttttcattaatagatactagtacttcaacaagtttttcagtaacatatttagtaattggaattgttctgcttattatatattttgcaaaagaaattatccctgaaactaactttggaagaaagaagttaatgaagctatcttttcaaacaaatactacagaaatcggctataaccgaagagaactagaagaagaactcaaaaagtttataactgataagggaaatctttggtatttatatactgattttcacaatggaatttcaacacattgtaccatatggattgaaaatgattggaataatcattacgattttatctatagagattatggatatgataatgtaaacgcaacttctgccaaagagatttttgaaatattagcagatgatataaactgcttgtataaaccagaaatccaaaaaaaattactagggacagattctgctgaatatctagtataccctagttttgatggagattatcacattgttccaggatcaagccgttcatcatatgactacatactaaaaaatatagctatatatgagagcgtttcaagttttgtgtaaacagaaaaaactgatataagatatgtcattagttatcgaggacagaacctgtttttcagggttctgtccttgtttgtattataatgcagttttagggcatgtcaagcaggactggctgtgccagccctgcctagcatgcattctgcttataacctttccaatctttcttcgaagaaaatttccagctgagaatggatctgtccccaatcctgacggtgtcccgtccatttcttggtgatatctatcatggccagatacagcattttcaggagactgtcatcggatggaaataccgtcttggatttggtgactttccggagctggcggttaaatccttcaatcgtgttcgtggtatagtatacggtaaatagttagtaccgtgcttttcacctaaaaccatgagataatccctttgtaaaactaaaagttttttaaaggaggatcttatggataagatcacacgtcaggtccgcattgaacattggacccagatcatgaatgaatgtttgaacagcggtatgaataaaactgaatggtgccgggctaatgggatctcagacaaacaattcttttactggcaaaggattctcagaaaagaagcttttgctgcttcgacatcaaaggacctttcggttatcacagacccggcagatgaaaccagcccacaaaagatttcgttcgcagagatcagcattccaataaaacaggagtctgtcagaaatggattccatccggatatcatcctccgaaaaggaccggtctctgtagagatatccaattccgtttcagcagaactcctgtcacgtatcggagatatctttcatgctgaatgatgcttccgggttccgcaggatctatctcgctaccggctacacagatctgagacgtggtatggaggggcttgcatccattatcaagttcaattttcagctggatccgtatcaaaaagatattctgttcctgttctgcggaagacgtactgaccgcatcaaagggctggtctgggaaggcgacggcttcctgcttctatacaaaagactggagttgggtgcattcaactggccccgcacaaaagaagaagcattggagatcaccccagagcagtaccaatatctcatgcagggactggaaattgttgcacgccatccgatccaggaagtcagaccggataagatcttataagatcctgtgcaaaacagagaaaataaaaaaacatcttccaatcatcataagtcccgaaaaagagttatccacttttcataattccgctgccttcatttattcaggagtactttcaggcccctttacagggcttgtggataagtactctgaaaagcccgaaaaactaatagttttttgagtttttcagagtattcatctattagtaaaaatgacgaataccctgtctgcctgattcgctttttctttatctttgcgttacaataggaacatcagataaaggagaacggcatccatggcaaaagtatatacagaagaagaactgaataatttcagcagggaaacacttatggcagtcatcctgtccatgcaggatcagattcaccagctgaatacaaacatggagcgcctgatcgagcagatcgctgacgcaaacaataagcgttacggccgttcttccgaaaaactggaaacgatctccggacagctggaactggagcttatatttaatgaggctgaagcacttacggaaacactgtatgtggttgagcctgttgaggaagatgtgatacagccgcgtcgtaaaaataaaggaaaacggaaggcagatctaaaagatcttccgattgaagtgatcgtccataccctgtcagaagaaaaactccaggatgtctttggcacagatggatggaaacagcttccagacgagatatataaaagggtacgtgtgcagccggcagtctatactgttgaagaacatcatgtggcagtctacgctggtaaggacaaccagacaatcataaaagcggaccgtccgaagaatctgctccgtaacagcctgctcactccgtcacttgcggcaagcatcatgaatgccaagtacgtaaacgggcttcctctttacaggatcagccaggaattcctgcggaatgacatccatatctccagacaggtcatggcaaactggatgatccagtgtgcggacaggtatctgggaatcctttatgaccggctccataaggagatgtatcagtttcatgtacttcaggctgatgagactccggtcatggtcactaaggatggacggccggtaaacagtaaaagttacatgtggatctatcggaccggaaagagttatacggatactccgatcatcctgtatgaataccagcggacccgaaaagcggaccatccggaagaattcctgaaggattttaaagggatcgtagtatgcgacggttactctgcatacaggaagctggacagggaaaatccagacatcgtctttgccggctgctggtcacatgcaaggcgcaggtttgcggaggcattgaaagccctgccgaaagcagcacagaaaaatgcgaaagagactgtagcttacgaagcagtcagccggatcgcagcaatctatcatctggacaaccagatggagggacagcctgcaaaagtcagaaagatgtaccgtcaggccaatatcagacctcttgtagaggccttctttgcatgggcaaaagagatccagattaaaaatcagctttccagaggaaagactctggatgggatcaactactgtatcaatcaggaagtttctctgaaagcctttctggaagacggtgatattcctatggataacaatgcgacagaaagtgctctgcgtagcttttgtctccataagcatacatggaagctgatcgacagtctggatggcgcaaatgccagtgccattatctacagcatcacagaaacggcaaaagctaacaatctgaatccttttcggtatcttgaacatgtcctgactgtattgaaggaccaccaggatgacagggaatatagttttatagatgatatcctgccatggtctgaaaaacttccagcaatatgccggagcaaaacaaaagcaactaatatttaaaaccttgcctccggaaacggcggcttaaagttagagcagtacggatagtttaccgtatacgtggtatagatcagacgtctgacagcttccggatacttaaaatacgttgaaagatttgcccagttatctttccatgactttgcaatcttagggtatttcccgctccatttttcgtcaaagctgtccagttctgccaatgcaacttcttctgtaggagctgcatatacacgcttcagatctgccataagtggtttgatctctttgtaagaaacaaatttcgtggtattcctgatctgatggattatgcactgctggatttcggtctggggaaatactgcttcaattgcctgtggaaaaccggtcagtccatccacacacgcaatcaatatatcttctacaccccggtttttcaggccattcaggatggagagccagaacttggcactttcattttgaccaacatacattccgaggacatccttacgtccttccatatcgatcccaatcgcaatgtaaacagcacgttttacaatccgcccctcattacgggcatggaaatggatcgcatccataaatacaacagcatacacactttctaatggcctttcctgccattcttttactattggcaggatcttatcagtgatccggctgacagtactgtcggagatctcaagatcgtataattcacgcatgtggctttctatatcggcagtagtcattccttttgcgtacatggaaatgatcttttcttccatgtcctgcgtaatcgaattctgatacttctttacaacctgtggttcgaagtcaccttttcgatcccttggaatatcaatctccatatctccgtaactggtatgtaatgttttctgggaatgtccattcctggaattatcggtttctttatttcgataatcatacttggaatatcccagttcttcatccaattcctgatcaagggcaccttccaaaatgatagacatcatatcccgcataatggaattaacatctgttccatcttttacttttacattgttttctttcaggtagtttcccatgagttctctaagcgctgctttttgtggtgaatccttttttcttgccataaaataaacctccaaactgagtaattctatcttacatcagtttggaggtttacacaaactttgggatactcccctatatatagcaatacctcgtggaaatgcagacaacaagaaagagcaaataaaatttctacttccagtgccacaaatatccattacaaacaaacttaataatttctctaaaaaaatagagggagcacgaaatggacaacttttcgaactccctctctgagacggaatattacggtgtggcagtccggacagatggtaaacggtagaacggttctttccatacttagttgaatttaatgtgaaagagttctccgaatagcactttcgctttcaatagttcaaaactgtttcgaccatacattacccgttttatgactttgattttatttacactgccttctgctaagccattattatacgaatatataattccattttttacagctgttatatccttttttatgccgtttctgaatgtttgaagttcagggatatcatatttttgtgctacattgatccattcatctaattttgtaggatttttagagaatatgacattacaaaagtctttggttaatgtatataactcactcaataaaggatatttttttaatacttcctgatactgtttgacagtgattgtgccaatatcctcgagttttttataaaccagctggcataaggatttcctttgcacatattcagaatgcggattttctgtttccttctgttcatacattcgtgttctttctttttgcataaacattcgtaacgaagctacactgccagtatatccctttttacaaataatatcatgtatttggggatacgttaatccctgactcctgagttttattacctcgttctcatatggagctaattttcctggaattcgaacattatagtgaccatttgtaactgaaaaatcaggatttaaataattttgtatagtcttatgggcacggtgcatctgagatgcaatctgctcaatcggatatcctgccaaagccatttctcttgcttcttttatttcctgttctttttgttttattgccagctggtgttgccgttccctggcaatttccttgctttctggatgaatattcttgtgcggtaacaccgcaaatccggcaggcagggaaccgcctgtccgggcttgcggaaaccgcttatgcgagtttactcgcgtaatgctttatccaagccatatacctcacgcattgatttatcatgttcagcatctatgcttgtgatatttattcggtaactgtcatgagcaatacggtcaatgatcgcatctgccagaggactgtcatcaccaccgagttggtcataccattcctcgaattcatactgggagcagaaaatcgttgaagatttcttccgtctccgatggagcagttcgaagatatccctctgttctgaatcagttggtttcaatagaagccattcatccagaatcaggacaacgggattggcatacttagccataacttttttgtagctgccatctgtccgtgccatctccagatcaataagcagatcagggagacggacatacctggtattgaaatattgcttacaagcctccatgccaaaggcacaggccatgtaagttttaccgcagcctgtagcaccggtgataaaaagattccggtgttcagatatatattcgcatgttgcaagccggttaatgagatccttgttaagcttgcgcccggaagtgtaattgatatccatgatagttgcttccggctggtcgaatccagcattacggatcaggcgtctctgacgattatttttacgattgctgtattcaatgtccaccagcataccaaagcgatcctcgaatgatacttctttaaatttaggatcatcaagctggttacgaaatgcatctgccatagtagtaaggcgcatttcaattaatttatcaattgtactctgattggtcatatatgtttacctccgatagtaatcggcaccttttgtgatgccgtgtgctttatgtgtggtcttggattcagtagtttctgattccggctttacagaactggttacaaggatgtttttaatactcttgtaactgggcgaagatgtataagataatgcctttttacaggctgcttcaagcaatgcatctgagtatttctcagcaagctttagaagccccatacaacttcggtaggtctgttgttccacacgtttggaggtcagtattgcgttgaccacagtgtacgtatttatgccaatccgctcagcccatttgcggaaccggtcgccgttccattccagatatttctggtggtcttccggcatatgttccatgaccgtgctgtactgcccggggcgtcctttcaggcgacgatgggaagcaatgcggttatggttgtagaaaatttcaatagtggtatctgttacctttacatcaactttctttttgatatattcataaggaactgagtatagcattccgtccacagatatgtgataattgaactggacgatggctgtcttccagtcactcagttcaaaacgggtagcaggtaatggtgccagcaatggtttttcttcctcaagaaataagcttcgccgactaccctctttcttttgaaagagcctttggttgaacagttcaagcttgtctctgattgcccggttcaattcggcaagggagaagaactgttcatcccgaagagctgctgtaatccaggtagagatatttcctaccgttccttcagtattcggcttatccttgggagttctgacacgcgccggaataatcgcggtgccatagtgttcagccagttcctgataagttttattgatctgctgatctttccatccaccattgtgaacaactgcagttttgcagttatccggtacgaggattctggcgacaccgccaaaatattcgtacatatggacatgtgcattgatccatgatttctgcttcatgtccagaaatgcttccacgtatgcatactggctgtaagtcattacaccaacaaatacatatgccttgatgatttcgccggtatccggatcaatgattgttgcaggattacctgcccagtcaacttcgacctgttcaccgggtttacggttgatatgcatggtagcacgatgtttctgctcatcctgttggatgtggtagcagaattgtgaatacatgagtggttcatcgccattggctcggcaatcctccatgtattccgtccaaaggagttttttactgactccattacggagcaactccttacgaatgtaagcgtagtcaggcatcctcttattggatatgacttgatttgcagacgggaaaaacttttctgcaagtacagcatcggtatcgctttcatcaagtggccaggaaatatctaattccttagctcgccttaaaacgcgattgaccgtcttcttggagacattgcagctgtcggcaatgttctgctgactgagtcccagactactaagtctgagaatctctcgatacttggtcatagtcatgacctcctttgaatgtatttacaccttggtgtatgattacattctaaaggatttatgataaaggtttccatcaccggaatggtggtttccttaaaaacggatttgcggtttcctatccccggacagcagggacacgaaggccggattattcattctggaatctggtcttctggaattgcaagatatttttggattgttttaggtgatgaatgtaacaataatgctatatccgatatggtcagtccttccctgcgtttttcatgggcgaattttatacgcaatgaccggtttgcagtgttatataatgctttcatttcatccgtaacgctttctgttgatggtatttcaacccttgcaggaaactcacgaaatatatatttacagataacttccgaaagtccctttatcaagtgaaaacggtcactaatctgtatgacatcaggatgagaatttgtagcagcggatgcgtatgtaatggctccatcccttgaaataacttcgatattgtgaaacgttttcagccagttgcagacatcatttgtatctcttgacggaatcatatcaacaatccgatgattttccaaatttatcataactgttccataagaaaatcttttacggagagcaaagtcatccacacataccatttttacagaagatttatccacaatggatggcattttttttaagcagatcacagatgctgcttttacaaactgaaatattttcgctttttaaaagtttagaagcattcaacgagcttagttgggatgatgtatataaaatattttggattaacctgttcgtttttttcgatttagcagccacaaatggatgtttctcggaaaaagttttatgagaacagtccagattcatacatcgcattttcctggtatctaccaacagaatgaccttttttccttgcataggaagatcttgaatttctctttcataaatagaatgaactttagatgtttttcttccacaaaacggacattctaattcagttattgttgatgcaatatgaaaaatcactttatcttcttttatgcgatattgtattagttcataggctgggtcaagtaacttaataaattcgtccatataaatatctctcttagtaaatatattttgaatgtattatataattttaacacatcaatttcaactaagtatggaaagaaccattctatcgtttacgtaagcatttaccgtatacgtaaattagtgtaatatcctcgcttttatcaacagaacccgtatagaccaaaactttttcggacaagctaccctcataaacataagaaaaaaaatcagaaagtgcaggagatcataaacagtattattattttcaaggagggaaaaacttatgctacgttatctgcctgttcgaaaagttcatgcaagacaggtccttgattccagggggaatcctacagtggaagcggaagtgacggtaggtgaaggaattgtggggattaatggatacacaggaagagccatggtgccgtccggagcatccacaggtaaatttgaggctgtggagctgcgggacggaaaccgggaggaatatctgggacagagtgtgaaaaaagcagtggaaaatatcaatacacgtctggcagatgccattatcggagagaatgccctgaaccaggcatggatcgatcatcttctaatcgaaaccgacggaacggagaacaaaagcagcgcaggagccaatgccacgctggcagtatctctggcagcagcccgtgcagcagccggggcccttcggcttcctctttatcagtatctgggcggctgtcataccctgcagctccctgtgccgatgatgaatattttaaacgggggaaagcatgcggacaatacggtagatcttcaggagtttatgatcatgccaacaggagcttgctgtctggaaaagggtatccgcatgtgtgcggaagtctaccagcacttaaagcttcttctccgggaaaaaggactctccacagcagttggagatgaaggcggctttgctccggatctttctgattcggaggaagtgcttaccctgatcgttcatgccatagaaaaagcaggatataagccaggagaagagatcaccattgccattgatgcagcctccagcgagctttatgatgaggaaaagggtgtgtactttttccctggggagagccgcatgaaaggagaaaagatctaccgggatgccggtgagatgacagagtattatgaaaaactggtggaaaaatttcccattgtttccattgaagacggtctctgggaggatgactgggaaggctggaaatatctgacggaacacctgggaaaaaagatccagctggtaggcgacgatctgtttgtcaccaatatcaaacggctgcactgtggcatcggacttgatgttgccaatgctatccttattaaagtaaaccagatcggaactctcacggaaactctggatgcggtggagatggctcagcatgccgggtatcgtgcagtaatctctcacaggtccggggaaacagaggattcctttatcgcagatcttgcagttgcctgtggggcaggacagatcaaaacaggcgcaccctgccgttcggaccggaacgccaagtataaccagcttctgcggatccacgaacagctcggagctcttggaagatataaagatccttttgcaaaaaaatctcagaaaaagccctgcataaaataaacggaaaatggttgaaatcccggtttagctatggtaaaataacctctagttgattaggaggtgtaaccgcgtgaacattttgaagattattctgactgtaatttatgcaatagattgtatcgctctgactgttgtcgtactgatgcaggagggcaagcagcagggtcttggctctatcgccggagtagctgatacttactggggtaagaataagggccgttccatggaaggtggtcttgtaagaggtaccattatcatgggagttattttctttgtactgtcaatcgtactgaacattatctgatctgccaggggcagaacagaagttggtaacactcttgctgcgttagcatgcagaagaaactcggatggggacttcttttgttaatcagcaggagtgtttttgcgttgatacaggggcacgggtgagccttcctccggaaggataacagggtaaaaatgaaatataaatatgaaacaggagaaaatgtgaaaagatcgaaaaattttgaaaaaagaaaaaagtttataatggagcttctgggagatccgctgtataaacccatgcgtctgcgtgagatcgcatctcttcttcagctggataagagtgagaaaaaagagctttttgacgtgctggacgagctttgcgcccagggcaaggctgaagtagataataaaggaagatacagcaaggtttccggcaagcgcagagacagacgaaagaataaagaagctctgaaggcagaaaagccggagcgtggccgtaaggaaagagaacgcagagagaagaatcatgaggaatatcgtttctctgagaaggacggaaccctcatggagggaacttttattggccattacaagggctttggctttgtggaagtggaggatcaggaacaggacatttttattccggaaaatgacacgggaagcgccatgcatcaggataaggtgcagattcttgtacggaacggacataaagagggaaaacgtcaggaaggcgttgtgctgaaggttctggaaaggggaatgccttcgatcgtgggaacataccagagcagccgtgattatggctttgtgatcagtgataaccccaaattttccaaagatatctttatttccagaaaaaactccatgggagcaaaggacggagacaaggtagttgcagagatcacagattacggctccagaaaccggaagccggaaggaaagatcacggaggtgctgggaaacttacgttcacctggaacagatatccttgctattgtgaagagctttaacataccaagtgtatttcctgacaaagtacttcgtcaggctgaccgtgtgccggatcatgtacaggaagcggatctggatggaagactggatctcagaaatcttgttacagttaccattgacggtgaggatgcaaaggatttggatgatgccatttccctgacaaaggaggatggaatctaccatctgggtgtgcacatcgcagacgtgagcaactatgttcagggcggcagtgctcttgacagagaggcactgaagcgcggaacttccgtctatcttgcagaccgtgtcattcccatgctcccggagcggctttccaacggcatctgttctctgaaccagggacaggaccgtctgaccttaagctgtctgatggatgttaatgaaaaaggaaaggtgatttcccataagatcgcagaaaccgtgatccgtgtagatgagcgtatgtgttacacagatgtgaaaaatattctggaagatactgatgaggtggcgaagaaacgctatgaagctctgatccccatgtttttcttgatgaaagagctttccgggatcctgcgtagccgtcggcatacaagaggttccattgattttgattttccggagagtaagatcatcctgaatgcggcaggaagagctattgatgtgcagccctatgaggccaatgtggcaaccaggatcattgaggattttatgcttcttgccaatgaaactgtggcacaggaatactgcaccggagattatccctttgtatacagaacgcatgaaaatccggatccggaaaagattgaaagtcttctgatgcttcttcataatgaaggagtcaacatacagaaatccggacaggagatcacgcctggtgagatccaggagatcctggaaagtattgagggaatgcccaatgaggcacagatcagccgcctgaccttgcgtaccatgaaacaggcaaaatatactacggaatgcagcggacatttcggacttgcagcgaagtattactgccactttacttctccgatccgaagatatccggatcttcagatccacaggatcatccatgaccgtctgagaggcagactggtaagggaaggacgtaccgagcattacaaggagatcctggatgaagtagcacgccagtccagtgtgtgcgaacggcgtgcagacgaagcagaaagagaatccgataagctgaagaaagcagagtatatgtcctatcatctcggagaggagtatgaggggatcatctccggcgttacaggatggggactttatgtggagcttccgaataccgtggaaggactgatccatatcaatacattacgagatgactattatgtatttgaccaggatgcatatgaactgcggggagacatgacaggaaagatcttccgtcttgggcagaaggtccgtgtccgtgtggcagatgcggataaaatgctgaaaaccgtggattttgtcctggctgaggaagactgagggagcgcgaaatggcaaaaaaaacaggaatgaaactgatcgcaaataataaaaaggcttttcatgattattttatcgaggatacttatgaggccgggatcgcacttgcaggaaccgaggtgaaatccttacgttccggtaaatgcagcatcaaggaggcctttgtccgtgtggaaaacggagaagtttatgtatatggaatgcatatcactccttatgagaaaggaaacatttttaacaaagatcctcttcgtgtgcgtaagcttttgctgcatcgctacgagatcaataagatcgaagctaaattaaaggaaaaaggattgactttggtaccactgaaggtttatttcaaggacagcctggtaaaaatagagattggcatggcacgtggtaaaaagctttatgacaagcgccaggatattgcaaagaaggatcagagaagagaagcggagcgagactttaaagtaaaaaatctttattgatcggctggtttcaactgaaaaagtaaaagtatgataaaatgcggggaatgagaaatgacagaggtacaggaaagacgtaaaaaaacggtagaagcatcgatgacggagcaggttcatctgatcatgcagcagcatctgaacggaggcggaagactttttggcggagcactgatgcagtggctggatgaggttgccggagtggtagctatgcgtcatgcggagacatatcgggtggtaactgcggcagtggacaatcttcagttcaagcatgcgatctatgagggagagatcgtagtacttaagggatatgtgacttatgtgggaagaacttccatggaggtcgagatcgatacgtatgtggaacagccggatggcatgcgtcatactgtaaaccgggcattttttgtgatggtggctgtagatgaagaccagaaaccgatccaggtgccggaactgatcattaccacagaagcggaaaaagcccggaatgaagctgcgaaaatgcgccgtgatatgcgcagacagcgaagggaaaacgggttctgacctcagctgttccaatttttgacatagtttaaaatatctaaagattctgtgaaattcagaacggtcaggttgacaagaaagtgatactctgtaataatagaaaaggaaaacctgacagcgaataggaccattttatatggaggagatataatgaaaaaacgttatttgattcttgccggaattcttgcagcgagcatgcttgcagccggttgcggaaagaagaactctgtggcaccggagcagaaggtggaggcaacggcaaccccgacggtaacggaagctgcgaaaacggatgtggtggagatgcagacctctacggatgaaacagcaaatatcaagaacgtaatgggaaccaagagtgagaccactaccagtattgtatttaccaataagatgaattccacgatttctgcaatttatgtccgtcctaccagagatgatggcgatgacagtgatgagacctggggaagcgatcttgtaaatggtaaattcacactggcttccaacgacaaggctgtttattatatggagaagagccagaaggacgataacggagatacagcaacaagctttgatgtaaggatcacattttctgacgaagagcagaatgaatgtttcttccgccagctgccgcttctgacgatctcacagctgagtctttgtatggatggtgagggtgaagacggaatcccatatgctacatatctggcgagcggaagcaccaaggaggtgtctaccctgaaggatgtaaaggcaaggcttggcattgaggatgacagtgaaagtgacagtgacagtacagattcttcagacagtacggctgtgactccgactccggagagttctgatgataatggagacagtacagacagcagttcgtccggcagttcggactccacatccacaccggatccaacatctgcaccagcttcctctgattcttccgatgcggatcctacggaagcaccatccggcgaggatgatccggcatctgtagcagcaagatatatcggtcagtccatgtctgagcttgagaatgcatgcggcagcccaaatggcagtgattatgaggacgagccggagtccggtaagacaggttattattattatgatacgtttacggtatccacaacttttgacaatgacggcaatgaagttgtatccggcgtatggtaaaggagaataaacatatgaaaagagtgttactgaaattaagcggagaggctcttgcaggagagcagaagagaggctttgatgaagcaactgttacagaggttgccaaacagatcaagacgatcgtggatgaaggacttcaggttggtatcgtgatcggaggtggaaacttctggagaggacgtaccagcggagccatggacagaagcaaggcggatcagatcggcatgcttgctactatcatgaactgtatctatgtgtctgacatctgcagatatgtgggacttaagacagaggtgtttaccccgtttgtatgtggtgcatttaccacactttattccaaggatgctgtagaagagagcttcgcagaaggaaaggttgtattctttgcaggtggtaccggccatccgtatttctctacagatacagctactgtacttcgtgctgttgagatcggcgcagatgccattcttcttgccaaggctgttgatggaatctatgacagtgatccgaaggtaaatccggatgccaagaagtatgatgagatttccatcgatgaagtagttgcaaagaagctggcagctatggatcttaccgcttccatcatgtgtatggagcagaagatgccgatgctggtattcggtcttgatgaaaaggacagcatcgtcaataccgtacatggcaagttctccggaacaaaggtgaccgtgtgatcaaaagggaataataaaaaaaaccatacagggagatatgtgaaatggatgagagaattcaggtatacgaaacaaaaatgggaaaaacactgaatgctttggagagtgagctgacaaccatcagagccggccgtgcaaacccgcatattcttgacaaacttaccgtagattattatggagcaccgactccgctccagcaggttgcaaacatttctgtaccggaggcacgtatgatccagatccagccgtgggaatccagcatgatcaaagcgatcgagaaagcgatcctttgctctgatctgggattaaacccgagcaacgatggaaaaatgatccgtcttgttttcccggagcttaccgaggagcgtcgtaaagagctggtgaaggacgttaagaaaaaaggcgagggtgccaaggttgcagtaagaaatatccgtcgtgatgccaacgatgcatttaagaaacttgcaaaacaggatgtttctgaggatgagatcaaagagcttgaggatcagatccagaaacttacagataagtacatcaaggaagttgacaaggcgatcgagaacaagtctaaagagattctgactgtataattgtaagaaatacgaggatagagagggcttctttgaagaagctctctttctgtatggaggagatttatgaacgtaccaaatcatatcgcgatcattctggacggaaacggacgttgggcaaaggaacgaggaatgccgagaacctatggacatgtaaagggatgcgccaatcttgaaaatatttgttatgatatcaaagaccttggggtgaaatatcttacggtttacgctttttccacagaaaactggaaacgctccagagaagaagtggaagcactgatgaaactgttccgcggttatcttaagaaatgtatcaagatttccaagaaaaataatatgaagatgaaagtcatcggagatgttactgcctttgcaccggatatccagcagagtgtccgggaactggaggaatattccaaagattttgacggtatttattttcaactggcattaaattacggaagccgtgatgagatccgccgtggaatgcagaagatggcacaggatgtaaaagacggaaaagttgagccggatggcattacagaagatacgattgagagctatctggatactgcaggtgtaccggatccggatcttttgatccgcacaagcggtgagcagcggctttccaatttcctgctttggcagcttgcctattccgagttttattttacaccggttgcatggccggatttcaataaagaagagctgatcaaagccatcgagaaatacaatcagagagacagacgctacggtggcgtcaaggaggagtagatcatgtttaagacaagactgataagtggtatcgtccttgtcattattgccctggcaactatcatttccggaagctggatcttattttttacacttctggctgtttcactgatcggaatgagagagctttacaaggtaatgaaggtaagcgatgagcatgttaccgtgctggaacttgtaggatatcttggagcagtgctttattatattgccatgaaagctgattttggaaattacggaacaatggcgatcatcatcagtatgatcctgatcctgtttgtttatgtattcggttatccgaaataccatgcagaacaggtgatggcagcattttttggagttgtatatgttgctgtgatgctttcctttatctatcttaccagaagccttccggacggaaaattcctggtatggctgatattcctgtgctcctggggatgtgacacctgtgcttactgtgtgggaatgcttatcggaaagcataaaatggcgccggttttaagcccgaagaaatccatcgagggagctgtaggaggcgttgcgggagcggcgcttcttggagtgatttatgcagcggcaacacagggaaaaatggctgagtatgccttgatctgcgcagttggagctctgatctccatggtgggtgatctggctgcatctgcgatcaaaagaaaccagaacatcaaggactatggaaagctgatcccgggccatggaggaatcctggaccgttttgacagtgtgatcatcacagcccctgttatttactatcttgcaaaaacgattcttggaatttaggagacattagaaatgaagaatattgcaattttaggttctaccggctccatcgggacccagacactggatgtggcaagaaaaaacgaagaccttcgtgttgttgcagtcagtgcaggcaaaagtgtggagaagctggaagagcagatccgtgagtttcatccgcttctggcagcagtctgggatgaaaaagcagcccgggacctgaaaacacgtattgcggacacggatacaaaggtagtcagcggaatggaaggacttctggagcttgcgtccatgccggaatcagaaattcttgtcactgcgatcgtgggaatgatcgggatccgtcctaccatggaaggaatccgtgccggaaaggacattgccctggcaaataaggaaacccttgtcacagccggtcatctgatcatgcccatggcaaagaaatatggcgtatctatccttccggtagacagtgaacacagcgctattttccaggctatccacggagaagaaaacaaagagatccacaagcttctgattacggcatccggtggtcccttccgcggacgtaccacagaagagctgcgaagggtcactgttgcagatactctgaagcatccaaactgggtaatgggacgaaagatcaccgtagattccgcaaccctggtaaacaaagggctggaagttatggaagccaaatggctgtttgacatggatctggatcatattcaggtggtggtgcagccgcagagtatcatccattccatggtggagtttaaggatggtgcgatcatggcacagcttggaactccggatatgagacttccgatccagtacgctctgtactatccgcacagacgatatctggacggagaccgccttgatttcacgaagcttcatgagatcacatttgaggttccggatatggagacattccggggacttcctatggcgatccaggcatcccgggagggcggaagtatgccgactgtctttaatgcagccaatgagcttgcagtaaagaaattcctggaggaaaagatcggctttctggatatttatgagattattgcacagtctatggaaagacataaaaaaatcgcacatccggatctggatgagatcctttctgtagagcaggatacttatcagtggatcgaaagcaggtggtaaattgagatttgtgattgctgtaattattttcagtgttgtgatactgatccatgagctgggacattttcttctggcaaaaaagaaccatatcgaggtattggaattttctcttggtatgggacccaggatcataagtacagtaaagggcggcacacgttattccgtgaaactgtttcctcttggaggttcctgcgccatggccggagaggatgcggaagatgacagtccgggaacctttaattcggctcctgtgtggggcaggatcgcagtggttgctgcaggtccgatatttaattttctgctggcatttgttttgtctgtgatcattgtaggctgtatgggctatgatccggcaaccgtattagaagtaacccaaaattctgctgcggaaaaggccggattgaaaaagggcgatgtgatcacggaatatcagggctaccatattgatctggggaaagatctttatgtatattcgtatctcaacgaactgaaagagggagataccatccggctgaaagtaaaacgtgatggaaaggaacaggagatttcctataaaccagatgtaaatgtgcggtatcttcttggctttaaccgttccgatgtaaattccatgacagtggaatcactgatcaagggaatgccactggaagaggcaggtctggaagccggcgatgtgatcacgaagatcaatggtgtggaggtcccggatggaaatgcatatgaaaaatacatcgaggagcatccgttatccaagaaacctgtgacaatcacctatgagcgtaacggactggaatatgaggcagagataacaccaagggaatacagaacaccggtttccggtttcggatataacacatacagtgaaaagacttccggctttaatgttctgaaatatggtgctgtggaagtgaaatacatgatccgtactacgatcttaagcctgaaagagcttgtgaccggtcaccttggaatgaaagacttaagtggtcctgtgggtattgcggatgccattggcgacacttacgaacagtccaagagtgagggaacgctgatgatctggatgaatttgttgaatatggcagttcttctttctgcaaacctgggagtgatgaaccttcttcctcttcctgcgctggatggaggaaggctggtatttctggtggcagaagcgatccggagaaaaccggtaaaccgtcaggtagaaggcatgatccattttgcagggctgatgcttttgatggcgttgatggttatcgttatgtataatgatattctgaagatattctgatgaggattatgaagtaaagatatataaaagatggaatggtcaggaagatgtccggattgttccatctttttttaatgaaacatatgaaaccaagatgaaacacatgaaacaagattgacattctatttgtaactttgtacaatcaaaaatgtagatagcgatattaaatcgtgcaaaatactaaaagaaataaggaataaatctcaaataataagaaaaaatcacataaggagatgagacaatggcaggtacaatcagaaaggttgcacaaatggcacatgtgtctccagcaactgtttcaagatatttttcaggacagaatgtagtgagtgatgaattatccagaagaattgaggaggcagctaatacggttggttatgtgccaaatcatccaacacgtaagtcagatggtgtgatcgtagttctgattcctaatctggaatttggatatttcagtgaatctataaaggagattatccggcagatgccaaaatacaaatgtagagtgatatttcttcctacatttccgggagatgatagttataagagtatcctgaaggaattgtatgtgatgggagttatttatctggaggaggagattgaccgtgaggtgatacgatatatccgggcaaagaatatcaaagtggttatgctgggaggcgcagcttttgacagcagatgcgatatggtacacattaacgatatgatggctgcttacgagggaatgaaatatcttcttgaaatgggacacagggagatactgattctgactgatctttctacaagcatcagttcaggattccagcggttagttggctgtaagaaggcaatggaggaatatggacttatgttcagtgatgacatggcagaatacggtcagcttaccttcgaaaaaggctatcgatctatgaacagtgcattgcgaaagaaaaagaagttcactgcagtgtttgctttttccgatgagactgcggtaggagcaattacagcgctaaatgaacatggtttgaaggttccggaagatgtatccgttttgggatttgatggattaagtatatcagagcgggtggttcctaaacttactacgatttatcagccactggataagatggtggaatggactcttgagattttgtgtaacaaaagtagaaacagagaagaaaatatagagtatacactaccctataaattattggaaagaggaactgtactcagaagggaggaaatataaaatgggggggaagagctttaaagatattctttggaaaatatttagatttgttttcctgggatttatggcactgatttcagtaggaccattagtatggatcgtgatgtcatcctttaaatccaataaggagatcctatcatctgcatttgcactgcctacatcattaagctttaatgggtataaggctgcattggatttggctccaatttttaagttttatggaaacagtgttgtgatttctttcacaagtaccctgctaaatatcctgattgtttccatggctgcctatgtgttggccagatatacgtttaagggaagtacctttatcacattgcttttatctgcgtctcttcttgtacctacttcagcacttctgatgccaatctataagatcatgatgggaatcggaatgtttgatacaaggtcagggcttgtacttgtgtatgcggcactgggacttcctacttcacttttcgtattcaaaagctattttcagggtatccccaaggaactggaagaagctgcctatattgacggagccgggttttatcggacattctttgtaattgtatttccattggctaaatcaggacttgcaacaggggcaattttacagttcctgacgtcatggaatgagttcatgttcggactcgttcttaccaaaagcacagaagtaaggacccttcctcttgctctgaattattttacatctcagttttcgtttaactatacagcgatgtttgcggcattgactatggtaattctaccaagtatcgtaatctatgtattgctgcaggaacaggttactaccagtatggtagcaggatctgtcaaaggttgaagatgaaaatttataaattatataaaaggaggcaattaatatgaaaacaaaaaaggtgatggccacagtattgtcagcagtgacagcattatccatggcaggaggcatggccacaacagtaaaagcggatgatgtgacagaaatcacatttcctacatcctgggttggtgtcagtgttaatacagaatggttccaggatcgtctggaagcttttaatgaggagtacggtgacagtatcaaggtcaatgtggaagaaatcgcaggtgatcagaactatgtggataagctgaaagttctgtattcttccaattctcttccggatacattcagtacaggtggatataatctgattgattcaatgaaggatcaacttgtcgaccttactgattatgtagatgatgactggaaaaaacttgcaactgatgcatgctgggatgtaaactcccgcgatggtaagatttatggaattccttataccagacaggtaataggatacttctacaacaaagatctctttgctcaggcaggaattgagaaaccggcaaagacatgggacgagttctttgagcagtgtgacaagcttctggatgcaggcattacaccgctttccatggatactgcagattccggttgggtaacttcactgatgcttggtgctatgattggtgagagcgatgagggagaacagtttatgaataccatgctcccgacagattataatacaaaagaatttatcgatgcagcaaccaggattcagaccatgtttcagaaatatacaactccggatgcagttggtggaaaatatgagaatgctgcaagcaacttctttatgggacagacagctatcattgcaaatggtccttggatgattagcgatttctatgatacttctatggttgaagatggatttgcagataaagtcggtactgcaatgtatcctggtgatgttatgtataacagtggaaaaattggctttaatgttgcttccaaggatgagaaaacactggatgcaactcttacatttgtaaaattcctcacaaatgaggagagccagcttaaaatgcttgaaattacaggcgatattccggctatggagggtcttacatctgataatgtaaagccacttgtaaatgaagtcatcgcaaacggcgataaagcagcgcacagtattaatgatttccagagcctttggtatgcaaatgtagtggatgagatcagtattcagtatccgcttcttgcgcagggtgaaattactccggaagagttcgcacaggctcttacagacgctgcacagaaaaactgataattatatgatttccgcggcttcggcaggacataccttcttctgaagtcgccggaggctaagaacagactgaaacaggagagatgagaaatgaaagttaaaaaatggaaactggcaagctttcttttgccgtgtctgctcctttttgcattgatttacctggctccgatgtgtatggtgtttggaagttcattttttgaatggaaagcaggcggtgtatttaaatttattggactggataattatatcaatgctttccggaacgacgcacgaatgcttacagcactgaagaatacgggaatctgggttgtgcttcagtctgttgtgcatgtgatgctaggaactgtgatcgcgtttatgctttcaaaaagaaaaaaaggttggaaagtcctcagaactatctatatgatcccgaatgtggtatctgcagcggcactggctgttattttcctgaatgtatttaatgcgcagtatggtattatcaattcttttgtaaaaacagtaaccgggaaaccatttatgaaaaactggttctttgatcagaacagtgcctttatcacagttacatggagctggcttctgtatacaggaatgatcatcattcttgtgcttgcaggtgttctgtccattcccgaggatgttgtggaagcggccaagatcgatggtgctacagacatgcagatcaatatgaagattcgtctcccactgatccgtactattattggaacctgtgagattctggcggcaaccagtatgctgagagaatttgaactcatttatctgacaaccaacggagggccgggagatacaacactgaatcttccactatacctgtacaaaacatctatgacagataataattatggttatgccaacatgatgggagtaattcttattattgcaggggtaattgtagtaagtgccattaatcggttgtttaagatgaatgaggcagactactaaaaagacagaaagaggaggaattacagatgaaaatagcagtaatcggcggtggtggagtacgttccatgtttttggcaaaaagccttgctcagagcagtttggaattggggatcaaccaagtgatttttatggataatgatccaaagaagcttaatatctatggtaaaatggcacagcaggttgcaaaacgtctgcagccagacttgcagctggaacttaccggcgaccctgtagaagccattaaagatgcagattatatcataacaacgattcgtgttggagaggatgatatgcgtatccaggatgaacgagtagctctgaatctgggggttctggggcaggaaactaccggtgcggcagggttttcttttgctatgcgttctgtgccggctctggtaaaatattgtgagcttgcaaaaaaatacgcttctccggatgtaaagatctttaactttaccaacccagcgggagtagtatctcagactctgcgtgatatgggatatgattttacctatggtatctgcgatgctccaagtagtcttctccattcctttgcaaaaatgtataaggttccgcaaaattctgtgacgggagactgctatggattgaatcatctttctttttttgacagtattaagctggatggaaaagagattttgccggagcttttaaaagatgaaagattgtatacggatacagatatgcgtttctttaaaaaagatctggtagagcatatgggatgtattcttaatgaatatttgtattatttttattacagagaagaagcagttcagcatattttggatgcgggtatcaccaggggagaagtgatccgtgatgtgaatatccatatgacggaggaactgtcacacatggatgtcgaaaatgattttgaaaactgcctgaaggtttatgataagtggtatggcaaacgtgaagatgcttatatggcaaatgagaccggcgtatccagagcaaaagaaccctatcattttgatgtttatgcaaaggatgatggaggctatgcaggtgttgccctgaaatatatccgttccaaattaagtggaaaagacagtgagatgatcctttgtgtaccgaataacggagcaattccgggactccttaatacagacattgtggaagttacatgtgatcttaaagatggtgagatgattccgcataaagtcccaaatcccggggaattgcagatggaacttattcgcagggtgaagatttacgaaaggctggcttctgaagcaatccgtacaagaagcattagtaaagcaattgactgccttatggtgcatcctcttgtcaattcctactcactggccaagaaactggtggaaacatatttagccacaaataaagactatatggaggaatggaactgatatgagttttgtaggtggcgtaggctattccaatattgatctgatctattctggtcttgatagactgcctgataagggagaggagattttcgccagaggattttccatgcagtttggtggtgggattccggctaccatgatcaatctttcaaggcttggagttgagtccagaattattacttttgcagggcatgatcttttttcggaatttgtgaaaaaaacactgaatagctatccggtaaaaactgtgaatctttataaaggaaacaagatgccggtggtgctgtcttccaccttgctatattgtggtgacagaagttttatttcatatacagacggaatggatcttaatgatgctgttatggatgaagtttatgaaaatctgaaaggtgcatatgtggtagatatgcatgttggatttttagatgtgtataaaagactgaaaaaagatggttgtatccagatttttgatacgggatgggaagatgatctgacattggaaaaatacaaggattatctggaaattgcagattattatattcccaaccagaaagaggccatgaagattacaggaacgtccagtgtggaagaggctgctgacattctgtcggaatttttttctgacgtgacgatcaaaatggacaaggaagggtgcctgcttaaaaataaggatggaataaaaatcatatcttctgtacaaaatgtaaaagctattgatgcaacaggagcaggagatgcatttatgagtggctttatttatggactttatcatcattatccaattgaacagtgcattaagtttggaaatgtaacaggaagtgcgtgtgttcagggaatgggctgtatcagcaattttgtcaatgaagaacagctcttggaaattgcgggaacgctagaagtcagagaactttgaagaggtggaaaaaatttataatctgtaactgaaaaaggtgtctcttatttgtatatcaggtaagagacattttttttatgcaaacatatactagcagagaaccagtgtgctttcaggcacaaaaaggagcctctgtttatgaaaaatcattcttatatttccatgcagcaggatatgccggatcagggacagctgcaggtgacggtgctggacagtgccagtaaccgtcctgtggaaaatgctacagtgcggatctcgtacacaggagtcccggataatgtgatcgaagaaatccgtacggattcctccggaaaaacgcccatgctggagctagcagctcctccactggaatacagcatgaaaccggtggagcagcagccttatgcagaatatacagttcggatcagtgcagaaggttttacaccaaaagaagttgccgggacagaagttcttccccattccattgccaggcagggagcatcccttagcagacagcagggtagtggagaggactatcagcggatcgtcatcggaccccatacgctttttggggaatatcctcccaaaaatccggaagcagagatcaagccgataaatgaaaccggcgagatcgtattaaacaaagtggtgatcccggagtatatcgtagtccacgacgggccaataggggatacctctgcacaggattattatgtaagatataaggattatatcaaaaacgtggccagcagtgagatctacgcaacttggccggaggacacgatacgtgccaatgttctggcaatcatgtcgtttactctgaacagagtttatacagagtggtaccgaaataagggttatgatttcaccattacatcctccacagcatacgaccacaaatggatccatggcaggaatatttttgagagtatagaccggatcgtggatgaactttttgaaaactacctttccagaccggatgtacgtcagccgatcctgacccagtactgtgacggacgccaggtgcagtgcaggaatcggggatggatgacccagtggggaagcaaagctctgggagatcagggatattccgccattgagatcctgcggagcttctatggaaacgatatgtatatcaatgtggcggaagcagtttccgggattcccgcatcctggccgggatatgacctgactatcggtgttaccggagaaaaggtacagcagatccaggaacagcttaatgccatagcaaaagcctatcctgctatcccgtcagtgactgtggatggtatttatggtccggctaccgctgcatctgtaaaaaaattccagaatatattcgggcttcctgcatccggagtggtggattatccaacctggtataagatacaggacatttatgtagcagtgaccaggatagcggagctgcagtaaatataaaaataataaaaatgttcctggccattttcggagtgatctgatcggggctgaggtgtaatgcgtgaacatgatttcagaaaaaatatttgacgttttagaataaaccaagtataatggctgtttgtatctttgaacgtaaattgtaaagagattgcgtttatgagcatgtgaaaaaagcgaaatgagaatgtctgctttacaaaaggagtgatgaaaatgacattttatcaggaactgcagttaagctcaaccggatcaaaacagctgatcagaaataccacagacaaaaaggagaaaagaaggcatattctgatctataattttaaagtgtatcttgtcatggcattttgtgtggcggttgtgacattgtacagtaagataaccggcaatgacaacagtgttgtaggagtaaccgtactgctggcagtgctggttttaagacaggcggatttcgggatccggacgtcccacggattgttgtccattgccgggatcttctgtattctgatcgcaggaccgagattatccaacatggtttcaccggtaccggcattttttgttaatgcgataagtatcctgttactgatgatcctgggatgccataatgtaattatgtataaccattccacatttgttctcggatatctgcttctgatgggatatgacgtaaccggaaaggcgtatctgcttcgtgtagaggggcttttggccggaatggttctctgcatggtagttttttataagaatcagaaaaaccgcccgtatcgcaggacgtttctggacctgttccgggaatttgacctgcattctgcaagaggcaggtggtatttaagactgacgctgatcgtttccagcgctatgctgatcatgtctcttttgggacttccaagagcaatgtgggccggaattgcttgtatgtccgtgtgcttgccgtttaccgaggactgcaagggaagagccggaaaaagggggatgttcaatatcgttggatgtattttgtttgcagtgctttatctgatacttccggaatctatgtatccctatattggaatgatcggaggaatcggtgtgggatattccgcaggttatgcgtggcagactgcatttaatacatttggggcactgtccattgcatcaggactgtttggaatgccggcagcagtgctgctccgtattggagccaatgtatttagttcaatttatactatgctcgcaaataagcttggggataagcttgtgcagcatatgtgggtacgaaagagtgcagaaatctgagatattgccctgaaaaaagttttgccgtataatgggtaatagcataacagcctggatattaccgggccgacagaggagaagattatgtacgaagaaacaacagaaaaactgctggaatttatcagtaaaagtcctacagcctttcaggcggcagaggaaacaagaagacgttttttggaggaaggctttacagaattgaaggaagaggagcgctgggagctggaaaagggcggaaaatattttgtcatgagaaatcattccgcgatcatcggattttccattcctgtcaatgattgcaggagatatcatatcattgcaagtcacagtgactccccgtcttttaaaataaaagaaaatccggagatgtctgtaaacggagcttatgtgaagctgaatgtggagcggtacggaggaatgatcctttctacctggtttgaccgtcccctttctgtggcaggtcgcatgatcgtccacaaaaacggaaaaattctggaaaagcttgtagatattgatagagatctggtcatgatcccgagccttgcgatccatatgaaccgagatattaacggaggctatcattataatgtccagaaggatatgcttccattgtacagtggcagtggcgaaaaaggaaacttcatgcggatgctggcagaagaggcagagatccgtccggaggatatcctgggccatgatctgtttctctataaccggatgcccggaacgatctggggatccaggaatgaatttgtttccagtccaagattagatgatctgcagtgtgctttcgcttcaatggaaggctttcttcaggcagataagaagaaggtcattgcagtccactgtgtactggataatgaagaagtgggaagcactaccaggcagggagctgcatccacatttcttaaagatgtactgtttcgtatcaatctggcccttggcggagatcaggaaagttatctgatggcccttgcagagagctttatgatctctgcggacaatgcacatgcattacatccgaattatacagacaaggcagatcctgtaaaccgtccggtgatgaatggtggaattgtgatcaaatataatgccaatcagaaatattgtaccgatgggatttccacagcaatcttcaaggaactctgcagagaagcagatgtgccatatcagacatttgtgaaccgttctgatattgccggtggttccactctgggaaatatttccaatacccaggcagccataaatacggtcgatatcggtctgccgcagctggcgatgcattccgcttatgaaacagccggagtgaaagatacggaaagcctgatccgtgcggcaaaggtattttacaggtgatatcggaggacaggaaaatgagcagaaaagcagtattttttgatgcggacggaacagtctgtgatatgaaaaaaggagtgccggacagtgccatagaagccatccgtgcgctggtagataacggacatgaagcgtggctctgcacaggaagaagtcgtgcgtttgtatcctggtatctggagcagatcccttttacgggaatgatcagtgcctgcggatccaccattgagaaggacgggaagagactttttaataaagagatgacgccggaggttgcaaagctttctgtggaggttcttagaaaatacggactgatcccggtaatggaaggcgcggattttatgtattatgacaaagaggagtataccgatgaagtgaactggtatgccagtctgatcacagaatccctgggcgataaatggaggcctatccgtggaaatgaggattgtatgcggatcaataagatcagtgcaaaaatgacggagggatgtgatgcggaggcagcgttatccattttgtcagaatactatgatatcatccgccatgaaggcagcagttcgtttgtgggaaataccattgaactggtgccaaagggatttaacaaggctgttgggatcgcaactgtgatccgcctgtttgatatttcgtgggagaataccgttgtttttggagacagcaacaatgatcttgccatgtttgaatacgctgcaataaaggttgccatgggaaatgcttctccgaagatcaaagaactggcagattatgttacgtctgatatgttccactacggcattcgggatggcttgaaatatctgaagctgatctgagagaatgcttcgtttgttttgtaggctatgagattgtaagaacagaaacatccacatcagaaatgatagctttatgtgaatatgcttttataaaaaaatgctgtaagaaccagaaatcatagttcttacagcattttatgttacagatttttccgggtagataatatgcagaagctgcaatatcagatcagtcccagacctttgcagataaacagccagagtgtcagggtaaaggcactgaataatgtggtaagaagcacgactcccgaagaaaaagagccctcatgtcccatgttttttgccatgacaaagcaggtaacggtgctggcagaccccagcatgataatgatggaaaccagcttgtcctttgtaaaaccgcaacggatggcaagaggaagaaaaagtgcttcataaccgacaagtttcataaatgtacaggcaacagatgctttcagccgggaaaaggcttttccgaagtgcagagatccgcccatagccatgaggccaagaggagtggcggtttttgcaagattgcctgccgtagagtccaggatcttcggaaatggaagacgaagaagggaccagagtgtaccggctgcaatgccgagaatgatgggattggtgacaattccctttaaagtgcgcttcagaacggtaccatctatttttccctgacctggtttaaagacagagagaactacaacagccattacattgtaaagagggacgctggcaatgatcatcagtggtgccatacctgcatttccgtaaaggttctggataatggcgataccaaggatcgctgcgctgctgcggtaggatgcctggataaactcgccccggatatcggaagggtggagaaaacgggacaggagcacggagatcataatactgagagatgtgatcgcaaaacagaaaagaaccatcttgggatcccaggcctcatagatatcgattttagcgatgtcctgaaacagaagcacaggcagggggatgacaaacacaaatttgttcatacgattgacaaatgtttcatcaaacagtccgatcctccggaaaaaatatcccaggagcagtgtaagaaagatgggcacggtaacattcagacagaaaataagattgtccataaaagaaagcctccctgtggtaaaatttctctgtttattatatccaaactacgaaaattgtcaaacgaggtatacgggacttgagatttctggtatgataaaaagtgttgcgaagaaagcagcacaggggttgagaaggagaaaggaaagaaaatgagatacggaaaaatacggatcgaagatggcttttttgtgtttaccagacatatgatgctcaacagtcttccgtgtaaagatattctctgggcgtacatgcgccgtgagggaaccgataaaaccggtgaaaagcagctgatcattaattatctggtgatcataaccagacgtcagaagcgttataaatttgatatgacagagcaggaggtacaggattgccttcagcttcttaaagtactgaatccggatcttgcggttggttttccaaaaggaagcaggcttccgcttcagaatcttccgaatacaagagatctgggtgcattgatgacagtagacggttcgcatattcttcccagaaagcttttgcgcagcggagaaatctatcatgcttctgctgcagacaaccggatcctttcagaagaatataatgtaaaaacagtgattgatttccggtcagctgcagaagtaaagaaaaaaccggatgatatcatggcaggagtggagtattatcacattccaatccgggatgaggacagcagtggaaacagcttttttgaacatgtgatgtcctgctatggtgatgtagaccggtatatgcaggactggtaccggaatttcgttacggatgagtattctctgaagcagtatgcacgttttctagatgtcctgcttcatgtaaagaatggagctgttgtttttcacagtgccacaggagaagaccggacaggagtcggaacagcacttttgctctttgctttgggtgtacctaaggaaacgatacgaagggattatatgcggtcaaatccatgtctggaagatgaactgaaatatatgcgcaggctttaccgggcagaccggccggaaaacagccggaagcttgcagatctgaaagccttctatcaggtgaaggagtcctatatcaatacagtttttgatgtcatcgaaaaagaaaacggaggaattgaaagattccttcggaaaaaactttatctgacaccaaaggcatccgaggagcttaagaaaaaatatctgatctgaggataaaaacatttcttatcatcctgaaggaattttgcaggaaattttgattgacaaatttttcgaagttgttataatggtaagaaagcaagggtttattagattaaagcgttaactgacgaagtcggttttctatacataaaagtgttgaaagcaggtgtattatggaaaagagaatactatccatccttgtggataatacctccggagtccttagccgtgtggctggtcttttcagccgccgtggatataatattgacagcattaccgcaggagtgactgcagatcagagatattcccgtatgacagttgtatgtgagggagatgatcagatgctccagcagatcactaagcagctggcgaagcaggaagatgtacgggatgttaaggtccttgaacaggacgacagcgttgcccgtgagctgatgctcgtcaaggttgctgtgaagccggaacagagacagggagctctttctgttgcagatatcttccgtgccaaggtggtggatgtaagtaaggattctcttattatggagatgaccggaagccagaacaagctgcaggcgtttgtggagctgatggctgactatgagatccttgagcttgcaagaacgggaatcacaggtctgtcacgaggcagtgacgatgtccgttacctgtaaattttttacatatgtttgctaggagagcagctactctcttaacgataaataatttttatgaagaagatgttgtaaacatcagaggaggaaagtaaaatggcaaataagattttttaccaggaagactgtaatcttggattattagatggtaagacaattgcgattattggatacggaagccagggacatgcacatgcactgaaccttaaagagtccggatgtaatgtaatcatcggtctttacaaaggaagcaaatcttggaaaaaagctgaggagcagggcttcgaggtatatacatctgctgaagcagctaagaaagcagatatcatcatgatcctgatcaacgatgagaaacaggctgcactttacaagaaggatatcgagccgaaccttgaggaaggcaacatgcttatgttcgctcatggcttcaacattcatttcggatgcatcaaaccaccagcatatgttgatgttacaatgatcgcgccgaaaggacctggacacacagtaagaagcgagtatcaggctggtaaaggtgttccttgtctgatcgctgtagagcaggatgctacaggtaaagctcaggatatcgcacttgcatatgcacttggaatcggcggagcaagagctggtgttcttgagacaacattccgtacagagacagagacagacctcttcggtgagcaggctgtactttgcggtggtgtttgcgcacttatgcaggctggtttcgagacacttgttgaagctggttatgacccaagaaacgcatacttcgagtgtatccatgagatgaaactgatcgttgacctgatctatcagtcaggattcgcaggaatgagatattctatctccaatacagctgagtatggcgattacatcacaggaccgaagatcatcacagaggatacaaagaaagcaatgaagaaagttctttccgatatccaggatggtacattcgcaaaagagttcttactcgacatgtccgatgcaggtgcacaggtacacttcaaggctatgagaaaattagctgctgagcatcagtctgagaaagtcggcgaggagatccgtaaactctacagctggaacggcgaggataagcttattaataactaagcaaaatttattgcaggcgcaataaattttgcgctactcgaacgaagcgcagcgaagtttgagtcaaaaaagtcacacacgtaatacagtggtaggaaacttttttgaaatttagaattcccatctggtcgcaatgatcagatgggaatttttttacattcctttatttatccggatgctctgtttcatcatcaaaaaatggcgcgatcaaagccgaatcagcatctttctgtctgcatacaaacccgatctcacgcagcggaaaagaaaatcctaccggtacttccaccagagttccttcttcaagctctttttttacaaaatcacggatcacacatgcaatcccaagaccaatttccgcaaactggatcagaagatccatagttgttacttccagaatatgacttaattccacatgatgttctttcaactgagtgttcacggtctgacgtgtaatattgtcctcatccagcatcatgaaagttgctgcctggatcagaggttcatccggatagagctttttctgattttccagatactgctgtgtacagacaaaggtatcctggattttcaaaagaggctgaaaataatatccccgaagcttctgcggccgtccgatgagtcccagatcgattttttcctcatccagaagctgcagcgtctgataagtagactggcaggaaattgtgatacgtacatgaggaaaacgtgcaatatagttttccaggtgggagagcagtacatatctggtaagagtagaactggcgcccagacgcagctttggaatgtcccgggaacggttatggcgaatggaattttctccttcatccagaagtgaaagagcttcttttactttttcaaaaagaagctcgccgtccggagtcagagtgacaccccgggaactgcgtttaaaaagaacggtatccagattctgctccagcttctggatcgccttgctgatagcaggctgactgatataaaggtcccgggaactgtgggagatactgccggtacgtgctaccgtataaaaaatatgataaagagacagattatcctgcatgcaaaaccttcctttcgaaaaatagtaaggtaataaaggtaataaaaaaatccgaagtcatcagacctcggaaaccttagctgttataatatttatgatgttcaatcggggcaacaggatttgaacctgcgacctcacggcccccagccgtgcgcgctaccaagctacgccataccccgcaacgcatataactataacataaacgaattgtaaatgcaaccattttttgaggagaaagatggttgtatggatgataataaagagtgtgatctcttgatactttcataggcttcacactctttacatgatatgatcaggctgtctgtattgtgttacctgggtcaggtaaaatacctcttccctgaagtacaacgacaagagtttctgttgtgtcctgtaaatttttgatatcttttcggatatcccgttctgcaagcttaacatccagtgaaaggtcgtccaggcgttttctgttggtatcacatttcagatcgatcatttcaagtctgttttctacccggttgaagcgggcatctatttcatcaaaacgaacatccatagcatcaagacgagcgtcgataccgtcaaaacgaacatccatagtatcaagacgagcatcgataccgtcgagacgagtatccactgcatccagtctggcgtcgataccatctaatcggttatttatattgcccagctggacattgatcgggtttatcataccggctaataattccaaatctttctgatctagcatatgcgtatcctcctataaaaattgtaccgcatatttctctgtgcggatattgtatcatgtttcgagtatgaagtctatgaaattatcaaagaacaaaatggacaggaacaataagttcttgactagtataatatatataataagaaaaaacaagacatatttttatatctttaataataatagaaaatgcaggcgaactacctgaagaataaaaaaaggaggccgggagttgtgcggactcccggcaaaaaagtatgaaaaagaaaaagattgtttagcatttgctatctacagttaataatatagtaaaaaaatgtgtgcattgtgtgaaaggaaaatgaagagaatgtgaaaactgccgcttaatgttagattaagcgacaggacctgaaaaaacctgtatataaggaaattcgccatttttctgaccacaaaagctgaccacttatgaccatgaatcttataacaagaagcctaatatttcccgcaaaatacaggtccctgggattatacatctgaccacttatcatgaccacttttatatattgatatgtatttttctttctctgatatataaaaagctgcataaaacggcacaaaaaacgacataattggacagctatggcagtttcagatcgcttgacaagcattaaagcggatgttatcattacatatggttcaaaatcttggatcaaacaacagaataatccgaaaaaattactgtcgcttaatctaacattaagcgacaagataataatattggataagttatataaataaacggaaggaagagaacatgccgtccaatacaggctacagcataacaaccagaagactccgactttgctgcggacatccggaatggctcaggaaaacccaggatttctataatgaaattgaaagcttttattatgatcttctgctggctcatgaggaactgggagaactggggagccagaaaactcttcgggccctggaggttctgactattatgggaagagacaagcaggttccccagaatccccttccctgggaaaaagtcccattgtatttcaggcgggctgcgataaacagtgctatagccgcagcaaagagtcacatatccaggcaaaagtccattccgggtaggaaagcagaaaagcttcattcagcagttacctattataaaggaatgtacagagatttttctcataaggagattacactgaaggtatggacaggagaacaatggaaatggatgagatgcagactgtatggcagagaatttcccgcagaagcagagctaatgtcaccctcagtaacctttgagaagaaatatctcatgctgcatgttcccgtgaaggaatttacagcagacactgcaacagtaaagcagcgtatccaggaagggcggaagatctgtgccatccagtttacaaacggagatgtttttgctgtggggacagtatgtgacggcacagggaaggaaacagatgtgaaattctggggcggcggaaaagaatatacgcatcgctgcgatcagatcaggaagaaaatcgagaaagcccggaaatctctcggcggggaaaaacagcccggagaaaacaggaaatactggatgcatctgaaacacctgtcggagcattatgcccatgagatcagttcacagatcataggcttctgcctggaaaagcaggtttcgctgatcgtccttccaaaatacaaaaaagaatacacagactatgtgatgatcggatcaggaaactggagcactatgcatctaagctccgggattaggagcaatcttccctataaagcatggaaaaacggcattctggtcattgaaacctatgcaaaagggatatccgaaacctgctctgtctgcggtgcgccagttaagacagcaaaccgcaaaacagatgaatatacctgtgagaacgggcacagaggaagccgaagcctgaacagtgccagaaacctgagccataaatgtattcttcagtttggaaaacaagtggtatgaccactgttttatagagcgagagcacaactcagcttctgctacaggcagatgctgacaggttgaataccgcctgtcgtgtctcccttatcataaggaagagtcggccaagaatttccgccagaagctccggcacagccgtgacagcggataagagtattcgaagttatgtaaaaaaagaaagtatgaaaaagcaaaggataaggatagcaatgaacacagaatacaggaaactgaaaaatctttttctgcggcaaagctgccaggatgcatgggaagactatgcacgaagcatccgcaaagtaaattttcccagatgggactatgtgatcctgacctcatcaaatgaagaacaggccagatccttccgcagccagatcgcagacagattggaacagggcgtactgccgggatggacaaaatatttcgtgctcccggatccggaaggcaagagagtaggctccggcggagcaactctgaatgtactccgatttctttcggaggaagaaggactccggggagatttccataacaaaagaatccttgtgatccattccggcggagacagcaaaagagtcccacagtattctgtgtgcggaaagcttttttcacctgtaccaagagaacttccggatggaagaggttctacactgtttgatgaatttctcatcagcatggcaggcgttccggccaggttcaaagaaggaatgctggtactttccggggatgtgctcctcctttttaatcctttacagatagatgcccagttccgcggagctgcggcgatctccatgaaatctccagtagaagtgggagtcgatcatggagtgtttttgaatgatggaagcgaccatgtaaaaatgttccttcacaaacagccggcagaaacacttcgcaggctgggagccgtgaatggacaggactgcgtggatcttgacacaggcgccgtacttctggacgccgaaatactggaaacactttttagtctgatcgctgatgcatcaggaaaaaaagcagatccggataaatacgaaagctttgtaaatgaaaaagcaagggtcagcttttacggagattttctgtatccgctggcggcagattcaacctttgaacaatatcagaaagaaaaaccggaaggcgaattctgcacagagctttttacctgcagagaaaaaatatggaaggcattaagtccttttcagatgaagctgatctgtctttctcctgcagaatttatccactttgggacaacgagagagctgcgtgctctgatgacagaagaagtaaccgattatgagttccttgactggaaaaaacacgtattcaccaatgacttgaattgccagggagctttgcatacagcactgatcgggccggaagcagacatcgaggaaggaacctatattgaagacacctgccttgagggaagaacctatgtcggaaagggcgctgtagtatccggactttccctgaaggatgtacatataccggcgaacacagtatttcacggtgtgaagctgaaggacgagatcacagaactttacggcggtcagacaggaggatgcgtgatccgtacatatggagtcatggataatccgaagaaaacgctggaagaacgaggaagctttctgaggggaaacctggcagattttctttccgccaatggactggagccggaagatatctggaccggcgaaacccacgcactctggaatgcaaaactgtatccggtctgcaaaacattccaggaagcagcacaggcaggaaaccttcttgtaaaaatgagcgaaggacttgctgaaccccggcagatcgagagctggaaaaaacagccgagactgagtctggaagaatccttccggtatggaaatacagaaaatatcctttcctggaaaaaagatctggaagcaaggatcctggtggcagtatttctgggagagttgaaaaaaggcggacattatattcctgcacttaagatctttggtgaaaaagaaatccaggaacgacattaccatctgctgatgaaagaagctgaaaaaacagatttttcacagaaaatacggatcctgtatgcagtatcacgttccatgaaatttacaaaaaaatgctttgacggaaaaacatacgatgtgttggagcaggagtgcttttcacagatccagaaagagatcgcatctcagacacagttgacaggaaactgcggctatacgatcgcaaaagaacaggtaaaggtaaatctgccggtacgtgtgaactggggcggtggctggtcagacacaccgccatactgcaacgaacacggaggaactgttcttaacgcagcaatcctgctgagaggctgtgaacccatcgaggtagagatccggaagataccggaattacatattgagctggcaagcacagacacaggtgcttacggaacagcagaaagtgcagaagagatccaggactgccataatccatacgatccttttgccctgcacaaggcagccattatcgcctgcgggatccttccgctggaggaaaaggccgacctgaaaaaggttctggaaaaaatgggcggcggattctacctttccacctgcgtcaaaggtgttcccaaaggctccggccttggaacaagcagtatccttgcaggagcctgcgtcaaagcttttgcagagtttcttggagagaactgggatgacagccagatctatgatacagtcctcaacctggagcagatcatgagcacaggcggcggctggcaggatcaggttggcggactgacacccggaatcaaatttatcacatcaagacccggaatccgccagcagctgaaggtagaaaaggtagagatctcagaaaaaacgaaacaggagcttcaggaacgattcgctttgatctatacaggtcagaggcgccttgcccgaaatcttctcagagaagtcgtaggaaattacatcggcggccgaaaagaatctctggaggcactggatgagatgcagaaagtagcagcactcatgaaatttgccctggaaaaagaagacatcgacgaattcgcgagccttctcaaccagcactgggaaatctccaaaaagctggatgccggctcaaccaacacctgtatagaccagatcttcagtgtatgtgaagacatgatcgacggaaaattcatctccggagccggaggcggcggcttcctgcaggtaatactgaagaaaggcgtcacacaggagatgctgcatcagaggttgagagaggtgttccaggattccggggtggatgtctggaatgtggagtttgtgtgaagataagttttgaaaaacttcatttcgtaataaggaatgaagtaaatttggaggaatatagcagatgaagaaagagagagcaggtaagaaaaatcttctgatttatgctcattactatattccagatactgcgtcaacggggcagatcctccgtgaactggcggagggtatgctggataaatttaacatcacagtcatttgtgtagtgcccagttatttagggacgattgaagataaatataaaacaaagaaatattatgaagaagaaatcaacggcgtaaaagtgctgcggatccgagtgccagaatttagcaagaccaataagaagagccgcgtaaaaaacatcgtttcttatttctttggagcaatgggagcaacctttaaggttggaaagatggattatgtgttctcaatttctcagcctcctattctcggcggccttcttggcgtttggggcaaatggatgaaacacgccaagtacatttataatattcaggacttcaatccagagcaggtgctggccgttggctataccaagagcaagttcgttacggacgttatgatgtggcttgacaagttcagctgcaagagaagtgacttgatcatcacagttgggcgggatctggtcgagacggtagaaggcagattcaagggcaagaaagtcccgaagactgtcatgatcaataactggatcgatgaaaatgaaatctatccgctggaagcaggcaacgagagagtagttgcttttaagaagaagtacggcctagatagcaagtttgtcatcatgtactccggcaatatcggtttgtactatgaccttgagaacctgatcaaagtggttgagaagtttggtgctgataccaagacggcagatggccgagaggttgtctttgcctttgtcggtgctggttctgtgttgaaaacactggaagactatgtgaccgagcatcatatggagaatgtagtttttatcccatatcaggacaaggcagacttgatttacagtctgaatgctggagatgtccactggtgtgtgaatgcgaaaggcattaaaggcgtgagctgcccgtcaaaatattacgggttggcttctgctgcaaagccagtaattggagtgttggaatctggatctgagattcgctgcattattgaggacacaaagggtggcctgtgttgcgagccgggcgagtatgaccaggtggaagaaaacatcagctggtttattgagaatgctggaagtgaaaagctgaaggccatgggagccagaagtcgggaaaaccttgaaaaaaatctgaccagaaacgtaagtgtacagaagtatgcagaagaaattctgaagctgtaaaggaggcgagagggaatgaatagtaactggttcaagctggttatgaagatgacgaaaattgaatatggaaagaacctcttgctgaaaggcgtaccaatcatcttcaacaaaggtggtgccaagctgaagatcggtgagaacaccacgattaagagcagcttcctcagtaatctggttggactttacagccggacaatcatcgttacccgtgcacctggtgcagagattgaaattggagataatgtgggaatttcaggtgctacgatttacgcccgcaagaagatcacgattggtgagaatacctgcattggtggtaactgcaagattctggataatgacttccatcctattgaaacagaaaccagaaacaaactgctccgggatgaaaatggtggtgacagtgatctggtgccaagcagagaaatcaagatcggtaagaactgtttcatcgggtgcaacagtataatcctgaaaggcacagtgctgggggatggctgcgttgtcggtgccggtgctgtggtatgcggaaaattcgaagataactgtgtgattgctggtaatccggcgagagttattaagaggttggagggcaatagctgatgaagaaaatatgttttattgctcagtttcctcctccaatgcatggcttatccaaggcagttgagactctttataattcaaatttgaattttgagattgattcgcaaggggagtttgaatttgaaaaggtggatattaccaataacaagaactttattaagaatctcctgaagataagccgtagcaaggctgatttgttttattttacaatcagccaaacgaaaggcggaaatcttcgggacttggtcatttttaagctgttggaattgcaacacaagaaatgtttgattcatctccatggcggatattatcgtcagttagtcgataacgatatggctggctggcaacgcaaagcaaattataaggctatcaagaaactatctggtgcgattgttctatcaaactctctgaagaagatttttgaggggatgattgatgatgacaggatttttgtcgtagaaaactgcgttgatgatcagtatttgctcacagaccaagaaatcgaagaaaagctgaaagcattagaaaatgaaaaagttcttcatgtcctttggttgagcaactttattagaagtaagggatattcattcgttcttgaaatggcaaaagccgaaaaagagcgtgtagacgctggtggagagaaaagattccattttgattttgcaggcaagttctttgaagacagtgaaaaagattactttgaaagctatataaaggaaaatgggatggaagagtacgttacatatcatggaattgtgggtggcgaacagaagaaagaacttctaaaaaaatgctatatttttgcattgccgactagatatcccaatgaagggcaacctattagtattcttgaggcaatgggaaatggaatgttcattatcacaacagatcacgctggtattccggatatcgtgaaggatggcgtgaatgggattgtgatatttaatgaacaaaataagaaaatgatttataaagaaatgctttatatttctgtcactgatttaaaggcaatttgtaataataatcgtataatatgtcaatcacattttagtgaaaagaactatttgggaaaaatgaaagaaatatataataaatggtgaaatattatgagtgaaaaagcggatattgattttgttatattatgggtagatgatcaggatccaatatggatagaggacaaaaataaatataaaggtcaacaaggaaatcatactaataatgaagtgcgttatagagattggcaaaatttgaaatattggtttagagctgttgaaaaatatgcaccttgggttaggaaaatacattttgtaacatgtggtcagaaacctgaatggcttaatataaatcatcctaaattgaacttagtcgaccataaagattatatagatgaaaaatatttgcccacatttagttcacatgtaattgagcttaacttacataggataccagatctgactgaaaaatttgtttattttaatgatgatatgtttttgaacgattatgttaaaccggaggattttttttccgaaactacacctaaagattgtgcagtgctaaatactataaaaatggacagagaaggaattccacatattattgttaataatttatgtgtgctttcggattattttgattttaaacttcaatttaaaaaaaatttaactaaatggattaatccaagatatgggaaatatatgctaagaacattattcttattaccatggaaagaatttgcaggattttatgaattacatacaccatattcttatttaaaggaaacatttagagaagtttgggaaaaagaagaaaaatatttggaagaggtgtgtgaacataaattcagagatgacaaagatgtaaatcaatggttgatgagatactggcaacttgcgaatggaaactttgtaccgcgttctcccgattttggaaaaatgtatattataaatgatgatacgaccttaatattaaaagatatagaaatgaataagcataaaactatttgtattaacgattcaagtaaaatttcgaattttgaaaaaactaaatcagaagtgttgagagcatttgaaaaaaaattcccccaaaaatcaaattacgaattataaaaagagagagaataacatgtgtaaaataagtatagtgacagtttgttataatgctgaaagaagtataaagagtacaatcgaatcagttttgaagcaaacatatacagattatgaatatattttaattgatgggaaatccacagataatacttataaaatagtatgttcatatgataagaagtttaaaaatagaggggtacagtaccgccatatttctgagcaagatcaaggaatttttgatgcaatgaataaaggaattcaaatggctagaggaagatatatcaattttatgaatgcggatgataaatttcatgattcagaagtattagaaacactttttgcaaatcaagaattggacgatgatgttatatatggaaatacagttagagtttctagagatgaaaaatggatgacaaaagcagatcctattgaattcatgaaatggaatatgccattttgccatcaatcaagtattacaaaaacaagtattatgaaaacagaattttttgatttagcttatcgagtggcagattacaattttttccttagactttatttaaatggcgggacttttaaatatgtagatttgataatcgctgattatagtatgaatggttactcaaatcaagaaaaatataaaacatatttgggtacgttgaaaataaaggaagacttaggcttggttgatgcaaaatcattgacacaaaaaattaaaaatatatatttcaaattactattatctgaaaatagttggattggaaatataataagtagtatagatgatatttatcgtaaatataaaaaacgggagattattaaataatgcttcataaaaaaacaatacatctcaacaaaactacattaatttgtttactgttgtatgtgatagtaattgtaagctgcagaggatatagattctatttacctcaacaatatcaatatattcatatgcagatttttggctttttctcagttgtatcattgatatatttttttatattatttaaacgtataaagaaagtagataattatataaacaagtacatgattatattagcgggaggttttgtgataccacaatttttgtacacacactctagatataatcagtcattaagtgatttctacagtgctgctcagcattatttttttcttatatggattattccattgttttatttgctgttaaatagtaatagcgaaaaggtattggatacgattgcaaacataacagtgataggatatatatcattgattattaatgcatttatgaataatcattttggatttatgctgttaaaaataagcggagatgcgctagcacaaaagaatggatatatacgaattgttgattgtgcggtttttacaccattagttatagcatatttattttctaacagtgttgtacataatagaaaattggatttttttaagatgtgcatagtattattaggacaaatatatgttgaaaaaacaagaatgggaacaattgcgttgttgttcatgttgatagcaatgttacttttttcaaaaaagaacaaattttctaaaatattaacatggatttttttgattttaggaggatttttctctattgctggtggaatgatcgaccagatattatctaaattttcaattcaaaataatggtaattcaacactttatagattgaatgaaattcaattttatatgagccattttattgaaaataaattgcttggtattggaattatatcgccggagaaaattatgaatgaatacggaattgcgtattggcagaatcataattatgaagatataggaattattggtttcttaggcattgctggaattgttgggattattgttatatatattattcctattataagaatgttatttgttttacaatctgtaaaaggtaaaattagttcgtattcagagtaccttatgcttataggaatgttttgctatattattgtcacaagtgcaacgctaatgattgtaaattatcaaagaatgccttgttttgctatatgtattgcattgtttgaatatatatatgtttcatgcaataaattagaaatgaaagggatacataaatgttattaataataacgggatgtataaaagtaaatgataatacgccatatgttgcagtaagagatgatcgcttgcgcttagatgattatatatcaacaattaaatgggcaatagagtcagaagtttttgataaaattgttttttgcgataatagcggatatgtatatgatgataaagaaattcaagatctcgcaaaaataaggttaaaaaaatttgaatggttatgttttcaggctagccctgatttagtgaatacatatggcaaaggatatggtgaaggagaaattattaaatatgttttgaataatagtaaaataatatctgacagtgattactttttttgtaaaataacaggaaggctaagaatctcaaatatagaaaacttgttgcgaaaagatagaaattgttttatgaaaaagcattattcaaaagaaattgatacgagattttattgtatatctatggatacttataaaaagtatatgctcaatgcatataaaaatacatatgattctcaaggaaagtacttagagcatgtattttatgaggcactaaagaaatataaaatcaaatataaaatgtttatggaaagacctttgtttttgggtatttcgggaagtacaggaagaaagtatgaagacattagaaaaaaacatgaaattattatagattttttatgtaaaactaatatatataacaatgagattttatggaatataatagcaagctgtaaaaataagagggtgactgataagtgaaacaaacaagtttgaaaagtaattttctatttaatttgatctatcagattcttgcagttataacacctatattcacgacaccttatatttctcgtgttttgtcagctgatggaatcggaaaatatagttatgctttatctattgtgacatactttggaatatttggatgccttggaactgcaacatatggacaattagaaattgccagaaatagagataataagaaattgttgcataaaactgtgagtgaaatattttttgggcgtttagttacattgatgataagtttattaatttactttgctgttattttaaaagcatcaggacaatataaactgttgtatagtgtgttaagtctctatatattaggtcaaatgaatgatgtgtcttttattttacagggacttgaatggttcaaaatgcttgcaatgagaaacattataataaaagtattaaacatagtattgatttttgctttggtaagagaacataatgatttatatatatatgcaataataattcatggcataaccttgattggtaatttttctttgtggcctcaagtaattaaatatattaagcctaaaagctttaaaaatatgaattttatacagcattggaagaaaagtatgatatattttattcctacggttgcaactatggtgtatacggttttggataaaagtatgataggatggattacaggatcggaatttcagaacggatattatgagcaggcatataaaattgaacagatattattggtttttgtaacaactgttggaactgttacatttcccagaatggcatatttttttgaaaatgataataaggaagaacgtaaacgtataatgggaattacaatgaaatttattatgttgattgcatgtccgatatgttttggtactatggcaatttcagagaatttaattcctgtttttctaggtaaaggttatgaagaatgtatactcttattaaggatttttagttttttaattataattattggattagacaatacgataggtaaacaatgtttgatttcagcaggtaaacagaaagagtataatattggagttattggaggagcaattgtaaactttgtgacaaatattttgctcatttctaaattaggagcatgtggagcagcgattgcttcggtttttgctgaaagtgttattttagtagtgtttattatatatagtaaagttgagttgaaaattcctaagctttcgatgtgctttttcaaatactttatttcagctatgtgtatgtctataatggtttggagaataggaatattaatttcaaataaattggtagctttaagtgtacaaatatttgttggaattattttgtatgggctctttctcttgcttatgaaagatgagttcgtaatggagagtataagaagagtcaaattaaaaatatgataagcagtgtaagctgttatgtgatgttattaagtaaacgcaaggtagtgtaaattattctgtgtaaacctctcagattgatgataaaatcataggtttatagaatacaaaaatataatgtaatgggctgaatggcatactttgctgttcagcctgttgtttatttagtagcatggattctattgcatgtcaagggcgcccgagaaaatcgggcgtttatttacccttgatatgcgattggatctgtgcttaatcgattgattattccggggctctttgagccacctgtccggactttgagagccaccattccggagaatgagagccatatattccggtaattcagagccaccttattgggctctattacatatatttcctttatactgtaaatacacacctttggtgtgaatacagataaaggaggtcgtaagttatgaccaagtatcgtgaaatcctacgcttgaaaagcttaggattcagtgagaggaacatcgcacagagttgcggtgtatccagaaacacagtcgctaaggttttaaaaaaggcagcggaaatcaagctttcatggccgctggatttcgacatgaccgacagcgcactagaggagctgatgtttcctaaggataagtcggcaacgaataaacgcatgccaaactttgactacatccgcaaagaacttctgcggaacggcgtaaacaaaaaacttctctgggtagaatactgtgaggagtgccgcatgagcagcgaagagcctctaatgtattctcagttctgctactacatccagaaggatgaagaaaaacgcagggctaccatgcatatccccagaaaaccaggtgaacagattgaagttgactgggccggtgaccctgcccacatcattgatccggacaccggagaaataacagatgcatggatatttgtaggtgtattaacttacagtcagtatgcttttgtaaaagcatatatgaatgagaaaaccgacaactggatcaaagctcatgtccagatgtttgatttctttggcggtgtcacacctatgcttgtttctgataactgcacaaccgcagtgaatcataaaaagagtgactggtacaacactgctttaaacacaacttatcatgagatggcagaacattacaatcttgccatccttccggccagagtccggaaacccaaagataaaccgaatgtagagggatcggtaggaaagatatccacatggataacagcagcccttcgcaatgaacagtttttctctcttgcagaattgaatgcttcaatccgtgaaaaactggatgcctacaacgcccgtaaattccagaaaaaggaatgtagcagactcagtttatttcttggggaagaaatgccattactggctccgttgcctgctacaccttttgaactggctgagtggaaacaagccaccgtccagtttaactatcacatcgcagtagacagaatgttctactccgtgccttatcagtatatcaaaaataaggttgatgtgcgtataacagatacaacggttgaaatattttataatcacaatcgtattgcctctcacagacgactctatggaagaagcggtcagtattctacagtgacagaacatatgccgcaggaacaccagaaatatctggaatggaacggtgaccggttccgtaagtgggctgattcgcttggaattaacacaagtaaggttgtcgatgcaatacttacctccggcaggattgaacaacaatcctacagaagctgcatgggattactgaaactggcagaaaaatattcgccagaaaagctggaacaggtctgcgctaaggcgctctcttattccggtaaacctagctataaaagtatcaaaaatctattggttgcaacaaaggatgcacctgataccgaatcagaatcatctcaagtagaaaaaccacacggcataaccaggggagccagatactatggaggtaaacaatcatgacaaatcaaggtacaatcgataaacttattgaaatgcgtctgactgctatggcagatgcattccgcatccagatggatgatcctgcaatgaaggaagttccattcgaagatcgcttcggtatgcttgttgatgtcgagtatagcaaccgtaaaaacaatcgtctgaaaaggctgatccgccaggctgagtttgaacagccagatgccagcatcgcagcgatcgattaccattctggacgaaagctgaacaaagcactgatcaaccgtctggcaacctgtgaatacattacagaatacaggaacatctttattactggagcaaccggaagtggtaaaacttatatggcctgtgcctttggcatggaagcatgcaagcactattactcagtacggtatgtacgacttcctgatctattattggacttacaggctgccagggacaatggaactttctcgaatgtcctgaagaaatataccaagccaatagtactgattcttgatgagtggctgcttcttaaactgaccgaagctgaagccagaaatctttttgaactgatacataaaagacgtaaaaaatcttcaacaatcttttgttctcagttccgtgaaagtgaatggtaccagcaaatctgcgatggtgaaagtactcttgccgatgccatcatggatcgtatatcgtatgattcctataagatcgatattgaaagtgttgacccagctaaagacctctctatgagagaagtatatggactggatccaacaatggcaaagtaacttaataaacaaactgaggtggctccgttagtccggacaggtggctctcgccacaccggactggcggctctgccgcaccgtaatattcatcgatatcctctggctggatccgatccccaaaatagatgcataactgatccagtgtcagaccccagtcccaagcctttccggtccattttttttgtagcatccatcattgccagatagagcatcttgaaaagtgcatcatcggtcggaaaaatagtcttggatttcgtaaccttgcgtagctggcggttaaaattttcgatggaatttgtagtgtatattaatttacgtatctcagatggatatttaaaataagtggataattgtgtccagttatttctccaaaatccaatggaagcagggtattttttgccccatttttcttccagatcttccaaagctgtgagcgcaagatcttctgtatcagctttgtaaaccagctttaaatccgctataaatggttttaaatctttgtaagagataaattttgtagaataacgaatctgatgcacaatacacctctggatctccacctgtgggaatactgcatggatggcatcaccgaatccggtcaatccatctacggatacgatcatgatatcttccacacctctgttttttatctcgttgagaacggacaaccagtatttcgcactttcatttcctcctacccacatgccgagaacctcacgttttccattcagtttaacacctatagcaacgtaaacagctttttttaccgttcgattgtcttctcgaacatggaaatgtaccgcatccataaaaacaatggcatattttctttccagcggccgattttgccattcttttgcgataggaaggattcgatctgtcatatgtgatatcatttctgctgatgcatccacaccataaacatctttgagatgagcggagatatcccttgtcgtcattccttttgcatacatagagagtacctgatcttcaatgtttgagatatctgtctgattctttttcacaatctgcggttcaaaatctccctttcgatctcgtggtatatccagatcgatcgttcccattgaagaggtgactgttttaggactataaccattacggctatcgtctgtctctttgttcttgtagtcatacttggaatatccaaggtgatcatccatttcagcttctaacataccttgcagcgtttcgcctagcaggtctttcagcatgtcctggacgtcctgggcatcctttggttgatagtgttccaacaagctactgatgaacgctttgcgttccggatccatttttcttcttcgtgccataaaaaaatcctcctgaattgatatttattttaacatcaatccaagaggatatatagctcttttagaatttacacagaattaattacagtctcaaacgcaaaatagcgagtatctcattacagcatacagcatctgtcagaccgctttgtctgcattcggttaccagttccatccattcttccagggaacgccctagggcacgtttcttactcataataaaacctccaaatgtagtaaatttctatctcctatcaagcggagtgtagtaaaaatctatttactatcattactgtaaattacgcttaaacggaatgccagttccgctgctgcggaacggctattccatttttaacggtacgaagtaccgctaaataatatcattctgtttcacgcatatttataccaaaagctgttgatgattcctgacttgttctggacataagattctcctcctccttaatatcaagtttttctcagtatatcaagaagagatccattcgtcactacgccatgttttgaggcacttaccaatgataggcaactttacgaaaaaaaggtttcatggtatcattattttatatataattgatgctatggaaccttttgaacataacagacatataaagtggtgattttagtgaatacaatttataggattcgtgaaagtttacaatgggatcaggaaaaaatggctgatgagatgaacgttacagctgttacactgaagcgttgggaaaatgaggatgggattccgggtaaagctgcccaggagaagcttatctctatatgccagaaggaaaaaatagatttggctgaagtagtagaggagtcaatcagagaacaggcacaggaaattgcgaaaagtaatccgtatagagaaattttgtttcatggttctgagtcgggattgaaaggaaatatttccttggctaatcggatatgtagagactatcgccgtgaaggtaagtattttgatgaaatcattgacagtgcaagacagaagtaggtgaaaataatggattcgatagaactgaagctttgtgatattcagggcaggttgtttgagttagcgtggaaagagcattataacagtgagagatttatcgtcaggctccggcaaaaaccatgaatgtaaattacctgatgtttcacacgatggatccggagatggcagtggaggatcttaaggaaatctacaggcaaaaaaggggtgtgtaaaatatgggtgcatcgcagatcgagcaatataaaaaatcaaaaagctgacagaagtacgaacctgtgtcattgtaaaagcaggtttattctgtcagcttttttatgtaagtataattcgttcggcggatgatgcgctgtgaaattataccagtttatttaatttttcaataatttctgtaagttcttctctggaatacccgccgaagcttaccagcgcacgtaatggcatggagtcggtcatggcttctgtcatttcttcagtgatagcttcggaagcggcttcagaagaggactcttcaccaacgttcatggctgagatatattttgctgtcaattcttttgctgtttcgcttgtttttgggttgcggaacagttcgcccagggtggtgttcatatgaacatgcatcggaagctcctggctgctgttcagatggatcctgccttcaagatggatatctctggaagaggtaccgacaaggagcttatattcgccgctggctgcgaaccagtcatgaagttctgtattgtaccatgcgaagcttctcttgtccagctccatggttactgttttagtttcgcctggattcaggaaaaccttttcgaagcccttgagctctttttccggacggatcgcggaactggtacagtctttgacatagagctgtacgacttcttttcctgccatatttcctgtgtttgttacatcaaccgaaacggtgatggtgtctttgtctgtaggattttcattggagatcttcaggtcgctgcaggcaaaggtagtgtaggagagtccatagccaaacggatatgctacatccatttcttttgtatcgtagtagcgatagcctacgaatacgccttcacggtattcaaccttttcaccaccgccgaagttcaggtaggatggattgtcggagagcttgagcggcattgtctcggcaagcttgccgctgggatttacttttccgtaaaggatgtttgcgacagcggtaccccctgcctgaccaccgaggtatgcttccagaagtccttttatatcattgagccatggcagctccacgggggaaccgttgtggaggacgatcacggtattcggctgtactttaaggatctcagcaatgagacggttctggcattcaggaagcctcatgtgggaacgatcgtatccttcagattcaaagctgtccggaagtccggcgaagatcacaaccttgtcagcggcggcagcagctttgatcgcttcagctgcaagtgcgtcatcgtagagatctttgtctgcaggaaaaccttctgcataagtaacctgtgcatcggaaggaacggaatccagtgcgtttgtgatcttgaagcagttgatatgagagcttccgccgccctggaaacgaggcttctttgcaaaaccaccgatgaaagcaattttctcggatgctttcagagggaggatctgctcatcgtttttcagaagaaccatagattcttcggcaatgtggcgtgcttcttcatggtctttttccatggtgaattcctgcggtgcccggttgtctgcatattcaaaaattatgcgtaaaatgcgttcaacagcctggtcaagaatgtcttccttgagggaaccgtcttttacggcctgtacgatgagggcatcgttgaccccattggaggaaggcatttccagctcaagacctgcctcaagacctttgacgcggtcattgactgcaccccagtcggacattacatagcccttgaagccccagtcgccgcggagaacatctgtgagaagccatttattctcagatgcgaaagtgccgttgatctggttgtaggagcacatgaaggtgtatggctgagctttttttactgcggtttcgaatgcagggaaatagatctcacgtaaagtgcgctcatctgcctcggaagaattactcatgcggtgatattcctggttgtttgctgcaaagtgcttgatagaggttcctacatgctgggactgtactccgtttataaaagcggctgcgatctcacctgcgagatatggatcctcggaataatattcgaagtttcttccgcagagaggagaacgtttgatgtttacggccggtccgagaactatggatacatcgttggcctgagcttcttttccgatggttttgcccatttcttccaccagcttgcggtcaaaggagcaggtgcttaaagcggccggcgggaagcagacggctttgatgctgtcattcattccaagatgatcgcccttgtcatcctgcttacgaagtccgtgagggccgtcgctgaccattacttccgggatccccaagcgttccacatgtttcagatgccagaaatcaagacctgagcacatgccggctttttcttccagtgtcatctggcttacgatttttttcagatcacgtttcattaaaaatacctccgaaatgtttttcttactatgaactatagcatgttttgctggtaaaatataacaaaaatttgttaaaaataaaaaaatattgcagtttagccgaattaagtaagtctcttacttcaattgcgaatatccgcatgaccctcacattttcaggaatataaaaacgatatgcaggtcgattgacagagcggtgagagatatctttttctggcttttgtgggaagagtgtagtaatataggtaggaataatgacagagctgccggacagaagaatggtcggctgtctggcttatgtgaaaggacttataatgaaagacatcatatcaagtattattacaagtgtactgacagctttgtaccagccattttggttttctgtgattctgtctgtgatggtactgtttttttatctctttgcctaccataatgagacaggtggaaggggaatcaggggcgctttttccgtgtggtggcagtatttcagaggaaatgctttttttcggaagctgttttttctgaccttttatacaaccatgatcttgtttcgcacgctgctgaaccgggatatgtggatgaatcccctttcggatgtgatggcgaactggtggatctggaaatatggagaggatggtaccagatatctcacaactgagtgtattgagaatctgatgctgttcattccgttcacgatcctgctgttctggaccgcaggaaagaaaatattgaaaaaaacaacattcttgaatattgtgtggaccggacttaagattacctttgtattctcactgtccattgaacttctgcagcttttcctgaggcttgggacgttccaggtttctgatctgacatataatactcttggaggaggtattggcggggctgtgtactggattggtcatcagctttcagtcaggcggggagccgaataatgtctgccgcagatagcaggaagacagagaaacggatcagcccggatttctgttcgagagtgatactttgaaatttttgtagttactgttcactggtaatattccgcgaggtgttttttgtgagcgaaggtcacagaaaacccgagacataccgcgcgaatttatgcgattagcataaattctgtgcatcgcgaagcgtgttgctgagaacggagtgaacagtaactttttgcgcggtgcatcgttaaaatttcgttgacaaatcttccataacgtgttaacctaataccagtttcaaaaagaaaatgcgtagatgaggaatagtacacaagagaacggagcacagagagctgctggccggtgagaagcagcggaagggatttgtggaactcgcctcggagcatctgcctgaaatctttatatattatataagagagtagacgcagacggtgtccgccgttatccggagaggatataaggatgtatatacattccgtatctgtcaagtgtgtgaatttttattcatgaaataagagtggtaccgcgtaggacagcagttgtctttcgtctcttgcagaatctgcagagtcggaagattttttttatgtctttatatcaaaaacagaaaccaaagagaaattttaatggaaacagaaagtggaggaaaacaaaatgatgacaccatccaagtacaaacgtcagtattacatgccgccggtgaaatgtatgaaatgggcggagaaagaatatgtagataaggccccgatctggtgctctgtagaccttcgtgacggaaatcaggcacttgtgatcccgatgagcctggagcagaaagtggaatttttcaagcttcttgtaaagattggttttaaagagatcgaggttggatttccggctgcttctgagacagagtatgagtttctccgtacgctgattgagcaggatctgatcccgaaggatgtaacgatccaggtgctgactcaggcaagagagcatattatccgtaagacttttgaagctgttaaaggcgccccaaaagcgatcgttcatgtatacaattccacatccgtatctcagcgagagcaggtattcaaaaaatcaaaagaggagatcctgaagatcgcagtagatggcgctgcacttctgaaaaaactggctgatgagacagaaggcaattttcagtttgagtacagcccggagagctttacgggaacagagccggagtatgcactggaggtgtgcaatgcggttctggatgtatggcagcccactgcagataacaaagcgatcatcaacctgcctgttacggttgagcattctatgccgcatgtgtatgcaagtcaggtggaatacatgtgtgataatctgaaataccgtgaaaacgtgatcgtttctcttcatccgcacaatgatcgtggatgtggcgttgcagactccgagatgggtcttcttgcaggtgctgaccgaattgagggaactttgttcggaaatggtgagcgtaccggtaatgtggatattgtaacgcttggtatgaatatgtattcccagggtgtggacccgaagattgatttttctgatatgccgcatatttgtgaggtttatgagaaatgtaccggaatgcagatctatgaaagaagtccgtacagtggagctcttgtatttgctgcattttccggatcgcatcaggatgccatcgcaaagggtatgcactggagagagaacggagatctggagcactggactgttccgtatctgccgatcgatccgacagatgtgggaagaaactacgacgcagatgttatccgtatcaacagccagtccggaaagggcggcgtaggctatatactggagacaaagtttggcctgaaccttcctccgaaaatgcgcgaggctatgggctatgcagccaaagcagtgtccgatcacaagcacaaagagcttcatccagacgagatcttcagcctgttcaaatctaccttcgaaaatgtggttgaaccatacagcatcaatgaggctcatttccagcagaaggaagacggcatcgtaacacgggttacttctacattccgtggaaaaaccatcgttacagaggcttccggaaatggtcgtctggatgcggtaagcaatgcactgaagaaagcttacgaactgaaatacacactggagacttatcaggagcatgctctggagcagagttcttcctccaaggctatcgcttatgtgggaatccgtaaaccggatggaacgcttgcctggggagcgggtgttgatcaggatatcattcgtgcctctattgatgcactggtaactgcgatcaacaatcgataagcatccggttccggataggtttacaaaaaatgagaagctgccataaaacgcagcttctttttttgccgtgcagatgctataatagtgcggaatgtgaaaataacagtgagtaagagggatattatgaaaaataagaaaaaaaacaggagctcatacagcctgtctgcagagctgaaaaacgctctgaaatatctgctgatatggggaatgatcctgatcttttccgcatatctgcttagtgattcggagatcctcggaaatgtaaagcagcaggcaagaccggatacctggtctatgatcggtgcgggaggaagctttgaagaggagtttacctgcaaaacgaaccgtctgtccggtgtggagctttttctttctacagagagtgcatcggttgctggaacgtttcagataacgctgtatcagaatgaaagggagatccagagctggcaggccagcagactgaccatatcgtcgggggatgccacgtatttccggcttgaccagaagcttacggaatgtaaggggcagaaattccggatcgttttagatggcgcaaaaggggataccggagtagctgcagggttggtgagccagaaggatgatacacagacacttgcctatcggatcatttccaggccatttccaaaatcactggtgtttctggtgattggagcggcggcagctgtgatgctggtgatctttgcatttctgaaacgcagacagctccgggcagaagtggtgtttgccgttgtttatatttttatgagtatctgtacgctggcggcggttccggcctttaattcgccggatgagtacagccattatctgagaagctatgaggtttccagaggatatctgacgtcggaaggcaacggaggaaacgacttattctcatatggaaggacgtttaacagtggtctggttccggaattttccgccaaggatcatgtatcattatgggatatcggagagaatgcagatcagcgtatcgaccgggaaaaaacacagttttacggatttggaaatacagccttgtatgcacctacttcgtatcttccccaggcagtagggatccgcattgcagatctgtttacggaccggccgatggttcttgcctatgcgggaaggatcgccaatatgcttatgtttggactgttctttttctttgccattcgtctgacgcctgttgggaaaaatttcctcgtacttctggggctggtacctgtgaatatccagtcagcaaattccatgtcagcagatgccctggccctggctctgacggttgctctggctgcctttgtactggctatgcgatataaacaaaaagaagtgatgagtagaagacagctgatatggatgtacgtgctgaccggattcctgtgtctttgcaaagtggtttacatgccgttttgcctgctcctgttcctgattccgaaagaacggtttaaaagcaggaaaaattactggtttcatgtggtctgtgcaggagctgtgatcctgatcttaagtttcggctggctggccattgcgtcccgatatctctgtgagtcacagccaggtgtggatacagctgcacagcttgtggggatcctgaaggatccggctgcctttgtcctgacttttgtgcggagcctggataattttggtgtgacctatcttacagaaatgataggaagtaatcttggatggctgaacattcctgtctgtgccctgctggcaatgggatatcttctggtcctggtccttcaggtttccgggaatgatgatatgtcgggaatccgtctggatcttccggtaaagagcattctgggaggagtcagtctcctggtatttgcgctgatctttgtaacgttatacggacagtggacagcctatggctacgataagatcctgggcgttcagggacggtattttctgccgcttcttttttcgctgatccttgcgctgaagcccaaacggtttgccgaaggagccggggaaacaccatgggggctgtttctgggagcctggagtattgatctgtgcgtttatgcgacacttttcgtgcaggcattgtgccgttttgcataaggtgtcggatctggtcgagcaaaaatccttgactggatgaaaacaaaatattataatcaaatccgtaaataacagaagaaaaaactgttctgaaaaaggataaacaggcagatagaagtacgatttccggaaagtgggtgtacaacattggacggagatggagacgctatctgcctttttttctgaaatgaaatatggcatgagtgtggataactctgcgattttatgtggattttatgtggaatacatgtggataaggtgtggataaaacacaaataccgccgttgaagcgttaaatacgggaaaaagcttgacatattcaatattattaaatataattttcccatacattacaaaaatgttacaaacatgtaaaggaaatcgtaatgatccgtatttatccgggaagcgatgataatgggggctgtgatgtcgcatcggaggattatgggctgttacagaaaatgaaacgcaaggaatgagattatgaaagttgagaaagatttacgtgagactgacggagtccaggatgaacgtagaaatggaaaaaccggaggaaattccgcgcgcagttttgcagtgctgacattatgtgcagttttggcgatggttatttctctggggacaaggacatttgcagaaagtgagggaggcagggtttatgcagcttcagatggaggagagagctctccctatgaagaggttgctgttcctaccgggatcgcaggtgtggtttcaggagttacggatacaccattatccggaagtacggttacaaggatcggaagttcctgtgagcaggtgatcgtaggccagagagtacagaaagtaaccaatactgctgcagatcttaatgtaagctcctctatggaaaacaaagtaaatgaacttgatgcaaggtcgatcacactggcagaaaatcccacactgatgtcagatgaagactatgatacacttctgaggatcgtggaggcagaagcaggaagtgaagatatcaagggccgtgttctggtggctaacgtcatcatgaaccgtgtaaaaagcgaagattttccgaatacggtgacagaggttgtctgggataacagtgacggcgttccgcagttttcaccgacctatgatggcaggatcaatgaagttgcagtttccgatgaaacaagggaagcggtcaagcaggcgctgaagggtacggattattctgaaggtgcactgttctttatccagaaatctgcagcagaggaacataatgtgaaatggtttgaaaaggacctgaagaggctctttaaatacggggtccatgaattttatacatataaataggaagaactgatgcagtacagaaggaaccaaccgccggcagaaacagaccggcggtttctttttatccgaaagctgtgaatatctgtctgatctcagggtgggattgggcaagacagattcttttttaaaagtggtggcattttccataattccatgctataatgtgataacgttgaaaagaaaacgaatatcttacaatagaaaggcggaacaccaatgcaggtattgtacaagagcaccagaggaaaagagcaggcagttacagcgtctatggccatacttaagggcctttctgaggacggcggactgttcgtgcctgaaagcattccacagctggatgtaccaatggacaagctggcacagatgacctaccaggagacagcatatgaggtaatgagccgtttccttacagattttaccgaggatgagcttaagaactgtatcaacaaagcatacgacagcaaatttgatacagaaaagatcgcgcctcttcatgaagcggatggggcatatttcctggaactgttccatggcgcgaccattgcatttaaggatatggcactttccattcttccgcatctgatgacaactgcagcgaagaagaataatgttaagaatgagatcgtgatccttaccgcaacatcaggagataccggtaaagctgccatggcaggctttgcagatgtgccgggaacgaagatcattgtattttatccgaagcatggtgtcagcccgatccaggagaaacagatggtaactcagaagggtgccaacacttatgtggtaggtattaccggtaactttgatgatgcccagactgcagttaagaagatgttcaatgatcatgagctggcagcagagctggatcaggcaggcttccagttttcttctgcaaactctatcaacatcggtcgtcttgttcctcagattgtatattatgtatatgcctacgcatcactggtacgcgacggcaggatcaaagacggacaggagatcaatgtggtagttcctaccggaaacttcggaaatatccttgcagcatactatgcgaaacagatgggacttccgatccacaagctgatctgtgcatcgaatgagaaccgtgttctttatgatttcttccgcacaggaacctatgacagaaagagagatttcatccttacgacatctccttccatggatatcctgatctccagcaatctggaaagactgatctatcgtcttaccggagaaaatgctgaaaaatgtgcggagcttatgaaatccttaagtgagggcggcgaatataccattactgacgatatgaaagcacagcttgttgatttttatggtaatttctgcagtgaagatgagactgcacaggccatcagtgatatctacaaaaacagcaattatgtgatcgatacgcatactgcagttgcagccggcgtatataagaagtatgtaagtgagacagcggatcatcttccgacagtgatcgcctctactgcaagtccgtataaattcacaagaagtgttatggaagcacttggtgaggagcataaagatctggatgattttggccttgtagatgcattaagtgcgctttccggagtacctgttccacgtgcagttgaagaaatccgtactgctccggttcttcatgacagggtggtagatgcagtggatatgccggcagcagtaaaggatatccttaagatcaaataataattgataataaaatcagtaagaaaatgtattttctgttgaaaaagcacaaatactggtttataataaaaacaacgaaaaccgaatcctggaatgttcgatcccccttttctttttgaacctacattgacattttgggaatccaaaatcgcaggttggatgtcagacctcacgtcgtggtaggcagaagacactgttgaggatacccacctagcatctgctaggcgtcaaaaataagggaacggcatcccgggattaatcggttaaagacatagagccggttagtggctcttttttcatatatgggaggaattacagcatgagtgtttctgaaaggaaatttgggacacttcctacaggggaagaagtaaaaatctatcatcttgagaataaaaaaggtgcctatgctgaagtgcttcagtatggtgcgatcctggtgaagatatgtgttccggataagaagggagatctgaaggatgtggtccttggatatgacgatatccggggatatgagattaatggatgctttttcggtgcgatcattggaagaagtggaaaccgtatcgagaattccagattttttattgatgataaagaagtggttcttgcagagaatgagaatcataacaatcttcacagcggtccggatggttttgagaaaaagctgtgggaagtaaaagaaatttcccaggagaagaacagcgtggatttcttccgcatcagtccggatggagagaacggatttccgggagaattttccattgttgtgaaatatgaattcacagaggaaaacgaactgaagattttttacagaggacgctctgatgcagctaccgttgccaatatgaccaaccattcttattttaatctgaacggagaaggcagcggagatgtgcttgaccaggaagtatgtattcatgcgaagtattttactccggtaaaagacagccagtccattcctaccggtgaatatgcaccggtggcgggaacgccgatggatttcaatgtttccaaaccgatcggcagagacattgaggcggactttgaacagctgaagtttacaggcggttatgaccataactatgtaaccgataattatgcaaagggcaatgtccgttcgatcgctactgcatactgcagggaatccggtatcggtatggaggtttcctccgattgcccgtgtgtgcagttctatgcaggcaattttgttaaggatgagaagggaaagaacggtcatatttatcatgaacgttatggattctgcctggagacacaggtggagccaaatgcagtcaatgtagaggatttccattctccgatcctgcttcccggtgaagagtacagctccgaaacggtttaccgtttttttgtgaaataacagataaacagaaataaaagaggtgcgagaaggcaatgcagatacgtgtggcagaagagagagatgcagcaacacttttagagatttattcctactacgtagaaaaaactgcgatcacatttgaatacgaaacaccttccatagaagagtttacgcagcgaatccatgatataaaggtgaaatatccgtatattgtggcagaagagaacggagagatcctgggatatgcctatggttcggcgtttcacccgagggctgcttatggctggtgtgcggagatgtctgtttatgtgagacatgaccggcggggcagcggtgcaggaggcagactctatcgagccttggagagtcttcttgcagagatgggaattctgaacctgaacgcctgcattgcagttgcaccaaaagatgatgaatacctgaccagtgccagtgtggattttcataagcatttcggctataagcgtgtgggagagttccacagatgcggctataagtttaaccgctggtataatatggtatggatggaaaagatgataggcgaacataagagcctgcagccggaagtaaagctttttccggaaatccaggataagatcggatttgaacgtttttcctggtgaaaaaagaaacctgagggaggtcagcatggacgaggaaaagaaaaatataatccagctcatgctgggatttgtgcgcagggcaaacggagatcatgtcagtgcatatgcggcccaggcagcgtattttctgatcatgtcttttatcccgtttatactgtttcttacaacgctgatccgttatacaccgttaagctataatgttgtcagggatgccatcatcgggtttgtgcccggaaatctgcagacctttgtgctgagcattgtggtagaagtatacaaaagaagtacagccatcgtgccgttgtctgcgttgatggcgctctgggcgtccggaaagggaatgcaggcgatcaccaatggcttaaataccatttatcatgtaaaggaaacccgaaactggctgatgacccgaatctattcggttttttatatgctgttgtttgtgctggcgatcattgtcactcttctggtcctggttcttggtaatcgaatccaagtagctgcacagagaaccattccgattctcgggagactgctggccaaggttataggggccaggacattgcttgtatttgccgtgctgtttgcagtgtttctggtcctttataaagtgcttccaaaccgaaaggcaacctttaaaagccagcttccgggtgcatttatgatcgcagtggcatggatgatattttcctatggattttccctgtattttgaattttttccgagttttggaaatatgtacggaagtctgactgcgctgatcatggtaatgctgtggctgtatgtgtgtatgaacctgcttctttacggggcggagatcaatgcctacttcgaaaatgaattccgaaaggcccagagatctgtaaaaacacttctttccaagaaagaaaatgaaaaaaacagttccaaagaatcctgactttgcgcttgacagaaggcagaccttgtggcatagtattaaaagacagaaaagctgtgaaggtgtttatagaggatcattttctcgcagagaagggaagtcaccggctgtaagcttccccgggttcagatggttcttgaatttcccaccggagcttcctctctgaagtaacagtaggagatgacgtaagctgcgcgttaagcagacaagaggtgcccgtgatcttttcatgggaaactgggtggtaccgcggatattccgtcccttttatgagggacggttttttattgcccatatctggatcttcggggtgggcggcggatcatttgatcattttaattaaaggagaaatagaccatggatatgaaagaaagacttcaggaactggctgaaaatgccagaaaacggatcgaggaatccgagggcctggataagctgaatgatgtgcgtgttgcatatcttggaaaaaaaggtgagcttactgcaatcttaaaaggtatgaaggatgttgctccggaagaacgtccgaaggttggacagcttgtcaatgagacaagagctaagatcgaagaacttctggaagcctccaaaaaggatttcgaggagaaggtccgtgaggaaaaaatgaaggcagaagtgatcgatgtaacacttcctgcaaagaaagcgaagatcggtcatcgccatccgaatactattgctctggaagaggttgagcgtattttcatcggaatgggctatgaggttgtggaaggtccggaggttgagtatgcggactacaactttacaaagctgaatattccggaggatcatccggcaagagatgagcaggatacattctttatcaatgattccattctgctccgttcccagacatcaccggtgcaggcacgtgagatggaaaaaggcaagcttccgatccgtatgatcgcacctggtcgtgtattccgttctgacgaggtagatgcaacacattcaccttccttccatcagatcgagggccttgttattgataagaacgttacgtttgcagatcttaagggaacccttcaggagtttgcaaaagagctgttcggaccggagacaaagaccaaattccgtccgcatcatttcccgttcacagagccgagcgctgaggttgatgtttcctgcttcaaatgcggcggaaaaggctgccgtttctgtaaaggttccggctggattgaaattcttggctgtggtatggttcatccgaatgttctccgtatgtgtgggatcgatccggatgagtatacaggatttgcctttggtgtaggtctggagcgtatcgcacttctgaaatatgagatcgatgatatgcgtcttctctatgagaacgacagcagattcctgaaacagttctaaaacagtgaacacggatcatgagtatccgtctgacagtaaatatagaaaaaagaagggacaaccaaaatgaatacttcattatcttggattaaaacatatgtgccggatctggatgtaacggcacaggaatatacagatgccatgaccttaacaggcacaaaggtagagggctttacagagctggatgcagatctcgataagatcgtgatcggccagatcgataagattgagaagcatccggatgcagataagctgatcatctgccaggtaaacatcggaactgagagtgtgcagatcgtaacaggcgctccgaatgtaaaagaaggagataaggttccggttgttcttgatggcggacgtgttgcaggcggccatgatggaaaaatgactcccggagggatcaagatcaaaaaaggcaaactccgtggcgttgagtcctttggtatggtgtgctctatcgaggagcttggaagcaccagagaaatgtatccggaagcgccggaatacggaatctatattttccctgaggacgcagttgtgggtgagagcgctgttaaagcacttggccttgacgatgtggtatttgagtatgagatcacttccaaccgtgtagactgctacggtgttcttggaatcgcaagagaggcagcagcaaccttccagaagaaattctgcccgccggttgtagaggttaaggaaaatgatgagaaagcttccgattatgtaaaagttactgtagaggatccggagctttgcccgcgttactgcgcaagagttgtaaaaaatgtcaagatcggtccgtccccgaagtggatgcagagatgtctggcttccaatggaatccgcccgatcaacaacctggttgatatcacaaactatgtaatggaagagtttggacagccaatgcatgcatatgatctggataccatcgcaaatcaggagatcgttgtacgccgtgcaggaaaagatgagaaattcgtcacactggatggccaggagcgtatcatggatgagaacgttctgatgatctgtgacggtgagaaggctgtcggcatcgcaggtatcatggggggagagaattccatgatcacagacgatgtaaaaacggttctttttgaggcggcgtgcttcgatggaaccagcatccgtctttcttccaagaggatcggacttcgtacagatgcatccggtaaatttgagaagggtcttgacccgaacaatgcacaggctgcaattgaccgtgcatgccagctgatggaagagcttggtgcaggtgaggttgtaggcggaatggttgatgtctgcagcgaaacaagagagccatccagagtaaaatttgagcctgagaagatcaacaagcttcttggaaccaaccttacaaaagaagagatgatcgattatcttggacgtgtagaactggtttatgatgaaaaaacagacgagatcgttgcaccgacattccgtcaggatatccactgtaatgcagatgttgcagaggaggttgcaagattctatggctatgataagatcccgatgacacttcctacaggagaggctactacgggtaagctgccatttaagcttcgtatccaggaggttgcaagagatatcgcagaatactgcggattctcagagggaatgtcctattctttcgaaagcccgaaggtatttgacaagctttgtattcctgaggacagtgatcttcgtaaagtcatcaccatcagcaatcctcttggagaggactacagtatcatgcgtacaagcacactgaacggtatgctggcatccctttccacaaactataacagacgtaataaagatgttcgtctttacgagcttggaaatatctatcttccgaagtcccttccggttacagagcttccggatgagcgtaccatgtttacacttggaatgtacggaaaaggcgatttctttgatatgaagggtgtatgcgaggagttcttcgagaagatcggaatgaagaaaaaggttacctacgatccaaacagcggaaaaccattccttcatccgggaagacaggctaacatgatctatgagggtaaggtagttggatatttaggggaggttcatccggctgttgcagataattactctatcggagaaaaagcatatatcgcagtgatcgacattctggatgttctggaatttgctggtttcaaccacaaatatacaggaattgccaaatatccggctgtaactcgtgacctgagccttgtagttccccatgcagttctcgcaggacagatcgaggagatttttgatcagagaggcggaaatattcttgagagttatcagctgttcgatatctacgagggcgcacagattgagaaaggtttcaaatccatggcttattctctggtattccgtgcccatgacaagactcttggtgaaaacgagatctccgcagcaatgaaaaagatcatgaatggtcttaacggacttggaatcgagctgagaagctgatgctgatctacattgtaagacatggcctgactgagtggaataaattaaaaaagcttcagggtgcagcggatgtacctcttgcgaaggaagggatccttcttgcagaaaaaaccggagaagctctccgtgatgtgaagtttgatatctgttttacaagtccgctctcaagggcaaaacagacagcagaatatgttctggggaaacgtgatgttccgattataccggataagcggatccaggagatcgattttggtgtgttggagggtgatcaggtaagagatgcagatggcaattatatcgatccgcagatcgagacttttttccgtgctccggtaaattttaaacgaccggaaaagggcgaggatatttttgatgtgatcgccaggacaaaggatttctgggatgaaataacatcagatccgactcttgcggataaaacaattcttgttgcctctcatggatgtgcagtccgtgctcttcttcagaatgtagatcttgatccggagaatttctggagaggctccgtgccgccaaactgctgtgttaatcttgtggaagtaaagaatggaaagacaacgcttctggaagaagatagagtttatgcatagaaaataatgagaaacgcagaataactgtaatggctgttctgcgtttctttttttgcttgtttttattggtggaatttcacaggttatgattgactaattgagataaaatgagataaaatatataaaagtaatggataattcagaaaaataaaagttaaactttactaattatataaagatgcagaattgtgttgggattatatgaaatcatttaaccaagtgcggattgcgaatatccgcctacggatagaggataattactgatagtgatgtgatatatggaatggggtgagtatatgcagtcattaaatgagacaaaagcaggggaaagctacacgatcaagtggatgaccggaatgccggagactatggaacagatcaggcaatatgatgtcagtgaaggaaagaccgtacagatcataagcaggatacttggcggagtgatcgtaggtgtttgcggacgcaggatcctgatcagcgatgatgcagcctgccgtataaaagtataaataaaagtataaaatagaaaaaagacgaaaggacaattcttttggcgaaggaattgtcctttctggttgttttagggaagatgttatgatagtatgggaacaaaagagtaacttttttcaaaaataaagacaggggaggcatattatgggaaaaaagtttatgaatacagtgctgtttctggcagtaacagtggccgcggcaaccctgactgcttatgttggaaaaggctccgggaatgtgttgctttataattttacatttctgggacttatgctgatcatatacgcagtggggctttttgcaggtttatatcggatggataacctgtcaagagcactgaagcatggctctggtgagatcacagaagtgtttcagcttccgggaagagccagaaaagaagagattgggcagctgcgagggatttttggtgaccgctatctcgacaaaaagatggatgattttgttgacagcatcagcagaacggaagaagggatcgctgaagtagaggattttgtgaatattgaggatgtagatgtacatatccacaagagactccttgagatggctccggacatttttacaagccttggtatccttggaacatttatcggtcttgtgtggggacttaagaattttcagcccacagattatgaagtgatgacaagctcggtatccgctcttgtagatggcatcaaagttgcgtttctgacttccatttatggagttgcactttctgttgtgtacacatttgggatgaaaagcggatattctgcgatgtcccaggcgatgcaggattttctggatcgttttcacgcactggtgctccctactgcggagaatgagtcctggaatctccttgtttccagccagaagacgcagacagaagccatgaaacagatggcggaacagttttctgtgcagatggcagatagctttgagaaagtgatcacacctacttttcagaagatgaatgattctctggacgttcttaccgcatctgtgacaaaagggcagcaggatgcgatccgggagatcctggatacgtttttaagcgagatgcatggttcctttcagatgcagtttgaagattttaatgatgctctggcagaacttaagaaggtgcagaaggagaatacagaatatacatcagaattgtacaagaccatgagcagtcagctgagtgaaacttttacgaagcaggaacgtgccatgaaggatgccattaaggaaatcgatgagatgcagagcagttatatgaagactgcagaccgtattatccgggataatcagatgatccagcagctgcagaaacaggattacgaaaagtttgcccggcatatgcatgaaaatgaaaaagaatccgcagatctctggaaaaactgtaatgcatctatgcgccagtatgtggacagtgctgcagaagggatgaaagcagttgcggattccagtaggatcagtgaggagcttcttcgtgaagataagaagatgatcgaagattttgaagccagagtgaaagaatttaccgagatccagaagatggtcaacagtgttctggatgaggtacgcaggcttctttctgagatcaagacggcaaaaaataaccgtgatatccatctgatcgccggacagccctggggctatggaagcaatgccggtatccaggaacttaaggataagctgacgggtctggaggatcttctggaaggacagggtgcaagacaggaagcgctgctggatgagatcgagcgcagtatccgtgaggcaacgaaggcagcacagaaaagccgttttggtttatttaaataagagaggaattgtcaatgcgcaaaaaaagaaagccggaggagcatgggtttaatgtctggcgttcttattcggatatgatggcaggagttttgctgctttttgttctgatcatgtgtgtgacactttttcaggcacagaagagctatcaggacagtctgaaggaacgggatgaaaaaatcgctcttcaggaaaaatatacagaagagcttcttgaaaaacagaatgcgctggatgagcaggcaggaacattaaagagccaggatgagcagatcaagtccaaggacaagcagatcaaatctcaggatgaagaactgtcttctctggcggagaagcttgccaaacagcaggaaacactggaggcacagcaggaaaagctgaaagaacagcagaaaaagctgtcctctcagaaaaagaagctttccagccagcaggatacactgaaagagcagcagtctgcgctggatgaaaaaacagagcttctggaagagcagcaggagaagatcgacaagatcatcggcgtgaaagcggaggttgtggaagctttgcagaaggaatttgaaaaaaagaacctcaatgtggatattgatccacagacaggtgcgctgacgttgaatgccaatgttatgtttgattatgatcaggcagagcttaccgattccggtaagatgacattgtctatggtactgccgacatattgtaaggtattgctggatgattcctataagaaatatcttggcgagatcattattgatggttatacggatacagacggagattacagttataacctggagctgtcacagaagaggtctctggcggtagcgcagtatcttttggatattaagagtgattttctgaaggattcacaggttcaggaactgaaggattgtctgacagtgaatgggcattccatgtcagatccggttttggatgcagaaggaaatgtagataaggatgcgtccagacgtgtagaggtaaaattccgtttgaaggatgaagagatgatccaggaactgaataagatcatgcagggagattctgcagagtccgacagtactgctcagaaaaaagaaaagaatcagaaagaaaatcaggataataagcagtaataaaatatggctgctttatattttttaaggaggattgggtatgaaaagaaaactggcattgatgctgaaatgacgcttctggctggcagcctggattcgggaatgctggtcagtgcagctgatttttcagcagaagagagtgtggaacaggcagtggaagaggagctttttccggctgtacattcctttcttccatccacattctggataatggggtggtggtagaagcaggtgcatttaagcaatgtacaagtcttacccgtatccatatccctgcatcaatggttacacatggttatgtgggtgagagttcggcgtatccgggaatttttgcgggagatacagggctgacgacggtcacctttgtgaaagggatcacaaagatcgccaagtacagaactcgccttcggctcagacagcaggctctgccgcaataacgccatctcccgcagcccaagtagtaatcacccctcctccgcagcagcccggctcagcgtaccaccataaatatcgaagaatacagggaccagatcggcccagcgtaccaccataaatatcgaagaatacagggaccagatcggcccagcgtaccactataagtaccgaagaatacagaaaccagatcggcacaacgttccattctgagtaccgcagcatacagacaaaagtcaacaacacagcacacacaacaacgcagaactccttccgtgcccaagagggtgggggtgcagggggagggccttcgggctacggaactctgagatggccttccccctgcatattcccgcattgaaaatgcgaccggcatagcgccatccagcgaagagacttattattaaaaaacaacacgataaacaacacaataaacaacaataaagataatcctaaaattacaaataagaataaaaaattgtcctataaagataaacttccaggaaaatctaaaaaaattgaaatttatggttgacaagcataactcccagtggtattataactgagctgtcgcaaataattgtttttaaaaaacaaacaattaaaaagaatttcagaaaaatgaaatttacagttgacaaaagacagaagatatgataaagtatccaagtcgtcaacaaaacgacaacaagatcttaactcaaaaatgtttgaaaaaaacttaaaaaagtgcttgacaaacaaaaagagatgagataaaataaacgagctgtctgagagacagacacaacaaaccttgataactaaacagtgaaacacatacgattctcgaaaatttctttacatttaaagaacggtttaaacaaaccaaaagcagtaaaaacgagagatagccaaacggttgtcttgagtaaatgaatcaaacattttatcagagagtttgatcctggctcaggatgaacgctggcggcgtgcttaacacatgcaagtcgaacgggaaaccttttattgaagcttcggcagatttagattgtttctagtggcggacgggtgagtaacgcgtgggtaacctgccttatacagggggataacagtcagaaatgactgctaataccgcataagcgcacagagctgcatggctcggtgtgaaaaactccggtggtataagatggacccgcgttggattagctagttggtgaggtaacggcccaccaaggcgacgatccatagccggcctgagagggtgaacggccacattgggactgagacacggcccagactcctacgggaggcagcagtggggaatattgcacaatgggggaaaccctgatgcagcgacgccgcgtgaaggaagaagtatctcggtatgtaaacttctatcagcagggaagaaaatgacggtacctgactaagaagccccggctaactacgtgccagcagccgcggtaatacgtagggggcaagcgttatccggatttactgggtgtaaagggagcgtagacggatggacaagtctgatgtgaaaggctggggctcaaccccgggactgcattggaaactgcccgtcttgagtgccggagaggtaagcggaattcctagtgtagcggtgaaatgcgtagatattaggaggaacaccagtggcgaaggcggcttactggacggtaactgacgttgaggctcgaaagcgtggggagcaaacaggattagataccctggtagtccacgcggtaaacgatgaatgctaggtgtcggggagcaaagctcttcggtgccgccgcaaacgcattaagcattccacctggggagtacgttcgcaagaatgaaactcaaaggaattgacggggacccgcacaagcggtggagcatgtggtttaattcgaagcaacgcgaagaaccttaccaagtcttgacatccctctgaccgactcttaaccgagtctttccttcgggacagaggagacaggtggtgcatggttgtcgtcagctcgtgtcgtgagatgttgggttaagtcccgcaacgagcgcaacccctatccccagtagccagcggttcggccgggcactctgaggagactgccagggataacctggaggaaggcggggatgacgtcaaatcatcatgccccttatgatttgggctacacacgtgctacaatggcgtaaacaaagggaagcgaacctgcgagggtgggcaaatcccaaaaataacgtcccagttcggactgtagtctgcaacccgactacacgaagctggaatcgctagtaatcgcggatcagaatgccgcggtgaatacgttcccgggtcttgtacacaccgcccgtcacaccatgggagtcagtaacgcccgaagtcagtgacctaaccgcaaggaaggagctgccgaaggcgggaccgatgactggggtgaagtcgtaacaaggtagccgtatcggaaggtgcggctggatcacctcctttctaaggaaaaagtagagaaacaagatgtgttttactgtttagctatcaagctgagatatttctggtgccgatgcggttgggggacacacccgttcccatcccgaacacgacggttaagacccaatcggccgatggtactgcactggagacggtgtgggagagcaggtgggcgccagatcaaaaaaagaaagacagggcaacctgatgagatagatgctggttttaccagtgatctgagagaaaaagttattttcctttcagatggctgataaaacatcagtcagcattgtaccttgaaaactgcatacatgaaatttgattaagttaatcaaatatccttaaacgcaaagtattaagaaattaatgcaaacgcaaagataggaagacatcgatttatctgttattgaacagagtaatcaaacacatgtcggaagatacgagagtatcggaagacacgagaatcaagagaccgcatcacctacgctagggtgatgaagcgaaaggtcaagcaataagggcacagggcggatgccttggcactaagagccgatgaaagacgtgataagctgcgaaaagcttcggggaggagcaaatatcccgtgatccggagatgtctgaatggggaaacccgcatgagcagacctcatgcatccatacgccaatccataacgtatggaagggaacccggggaactgaaacatctaagtacccggaggaaaagaaagaaacatcgattccgtaagtagcggcgagcgaacgcggaggagcctaaaccggtgtgcgtgcatgccggggtcatggactgcatttaagattcagcgaagttaacagaacggttttgggaaagccggccggagagggtgaaagccccgtacgtgaaagcagagctgactgagcaggatccggagtaccacgagacacgaggaaccttgtgggaagtaagggggaccaccccctaaggctaaatactacttagtgaccgatagcgcatagtactgtgaaggaaaggtgaaaaggaccccgggaggggagtgaaagagaacctgaaaccctgtgtctacaagctgtggaagtactttatatgtacgaccgcgtactttttgtagaacggtccggcgagttacgcttactggcaaggttaagcacttcaggtgtggagccgtagggaaaccaagtcttaatagggccagagtcagtaggagtagacccgaaaccgggtgatctatccatgtccaggttgaagctgccgtaagaggtagtggaggaccgaacccacatccgttgaaaagggtggggatgaggtgtggataggggagaaattccaatcgaacccggagatagctggttctcctcgaaatagctttagggctagcctcggtgtgagtcttgcggaggtagagcactgaatttcctagggggcgtcaaagcctaccgaagaatatcaaactccgaatgccgtgtagatatcaccgggagtcagactgcacgagataagttgggcggtcaaaagggaaagagcccagacctacagttaaggtcccaaagtgcgcgttaagtggaaaaggatgtgggatttcgaagacaaccaggatgttggctcagaagcagccatacattcaaagagtgcgtaatagctcactggtcgagaggtcctgcgccgaaaatgtccggggctgaaacgcgccaccgaaactaaggaatctgaaaagattggtagaggagcattgcatgcgggaagaagcagtaccggaaggagctgtggactgcatggaagagagaatgccggaatgagtagcgagatagaggtgggaatcctctaggccgaatatccaaggtttccagggtaaagctgatctgccctgggtgagtcgggacctaaggtgagggcgagagccgtagccgatggacaacaggttgatattcctgtactgcagtatgacagaactgtggggacacgtaaggagagcgggagccgggaatggaaagcccggtacaagcgaggtaccagtatggtaggaaaatccgccatgcaatgggaagacgtgatgtggagtgaattttagtaacgaagcccgtgagccatgcgtcaagaaaagccgctatcgttcatattgtacccgtaccgtaaaccgacacaggtggatgaggagagaatcctaaggccggcggaagaagtattgccaaggaactcggcaaaatggccccgtaacttagggagaaggggtgcctgcgagagcaggccgcagagaataggctcaagcaactgtttagcaaaaacacaggtctatgcgaaaccgaaaggtgaggtatatgggctgacgcctgcccggtgctggaaggttaagaggagaggttagacgtaagtcgaagctttgaatttaagccccagtaaacggcggccgtaactataacggtcctaaggtagcgaaattccttgtcgggtaagttccgacccgcacgaaaggcgtaatgatttgagcgctgtctcggcaatacatccggtgaaattgaagtgccagtgaagatgctggctacccgcgccaggacggaaagaccccatggagctttactccagtttggcactggggtccggtgttgcatgtacaggataggtgggaggctgagaaacggtaacgtcagttgccgcggagccgctgttgggataccacccttgtgatattgggcttctaaccagccgccgtaatccggcggtgggacaatgccaggcggggagtttgactggggcggtcgcctccgaaagggtatcggaggcgcccaaaggttccctcagaatggacggaaaccattcgaagagtgcaaaggcagaagggagcttgactgcgacaccgacgggtggagcaggtacgaaagtagggcttagtgatccggtggtattaagtgggaatgccatcgctcaacggataaaagctaccctggggataacaggcttatcactcccaagagttcacatcgacggagtggtttggcacctcgatgtcggctcatcgcatcctggggctgtagtaggtcccaagggttgggctgttcgcccattaaagcggtacgcgagctgggttcagaacgtcgtgagacagttcggtccctatccggcgtgggcgcaggatatctgagaggagctgtccttagtacgagaggaccgggatggacggaccgctggtggaccggttggcttgccaaagccatggccgggtagccaagtccggaagggataaacgctgaaggcatctaagcgtgaagcccccctcaagatgagatatcccattcttagtgaagtaaacccccttgaagacgacgaggtagatagggcagaggtggaagtgtggtaacacatggagctgactgttactaatcgggtgagggcttgaccaaccagccgaggaagcggggataccccccgctgtagtatcggtacgcaggttaaatttgattcaaaaagtttgattaaccatcaacaaagcatgtatgtagtttttaaggtacaaagggaaagaggaaagcaggagaaaaatcagtacatggatttttctcctgtttttattatatataatcatacatctcccaccatttacatctctttttccatatgctacaataggtaagaccaaaggagcctgaccaggctgtgaggaggtgcaggctttgacctttgaacttgatttgggaaatttaatcgtaaggaggaaagaaaagagtatgtttaattttcttgtgactgccgaaggcggtctcacaacggcaggatatgccgtatctgttattgcagtcctgattttgataattctggtagcagtattacttcagaaaaacacatctgcattaaaatttaccacacagcagctggttacctgtgcagtagcattggcacttgcatatgtaacttcctacattaagatatttaaactgccatttggcggatctgtgaccttgttcagtatgttgtttattgttctgatcggttactggtatggcattaaggtaggaattcttaccggtcttgtatatgggatttttcagttcctccaggagccatatgtcctttcattttttcaggtatgctgtgattacattctggcatttggagccatggggctttccggattatttacaaaatccagaaaacatggtcttcttaaagcatacatactagcaattctggcaagaggggcattccatgcacttggcggatatctttattggatggattatatgccggataatttcccgaagtctctgacagctttgtatccgattatttacaattacagttatattcttctggaaggtgtactgacgatcgtagtaatttctattccggcagtatcccgtgcacttgggcgaatgcgaataatggcaactggtggaaaccgacaatctgcagccaccgaaaaataattaatacagacacataaataaaaatagatcgttcaagctactacgatctttttttattgaaaaatcacaaaaagttatataaaacaaaccaaaaacacaaagaatacttttcacctaaagaaagttgtgctatgataatcaggcggaataatttcccattcaaacggatgaaggcaagtccccacctacagtttattgcttttcgcaaccacataggagacttctttgattcggttaaaatatttcagacagatataacatatctgaacatataaaatacaaaagaaaaagcagccatacagttgcgaaaaggagaatatcttaagtaatcaaatttgttgactaatgtgatcaaatgtgtttaaaagtactcaaaagagtaaattattatgaacacatcaaatatcacaaattacaagccaaaagattttgctgaactgttaggtgtatctgtaaaaacattacagcgttgggatagagacggaactctaaaggcaaaccgaactccaactgatagacgttattacacttatgaccaatatctgcaattcaaaggaataagtactgaagatgaccaacgtcaggtagttatttatgccagggtatctacaagaaatcaaaaagatgatttacaaaaccaggttgcatttttacgacagttttgtaatgccaaaggtattattgtagaccagtgtattgaagattatggaagtggccttaattacaatcgtaaaaagtggaacgaattattagatgaagtgatggaacaaaaaatcaaaacctcgtgcaggatattgtttcaatactccatgtgttctcttgcaggttgtacggacttcgtaagtataaaaaacaaatagaaagggatgtggaaattgctaaagagcttcaagacggaaataaatccgtcagaggaacagaaagtcaagattcataagacgataggaacttgtagatttatttataatttctatcttgcccataataaagaactttacgacaacggtgaaaagtttatgagcagtaacaggtttagagtctggcttaacaatgaatatctttctgagcatccggagtattcgtggatcaaggaagcttattcaaaagcagtaacacagtcagtaaataatggacaaactgcttttacaagatttttcaatcacgagagtgcttttcctaagttcaaaaagaaaggcagatctgatgtaaagatgtattttgtaaagaataatccaaaggattgtcgttgcgaaaggcatagaatcaatattccgtcacttggttgggtccgtatcaaagaaaaaggatatattccaacaactaaagacggatatgtggttaaaagtggcacggtctcaatgaaagctgacagatactatgtttcagttcttgtagaaatttctgataacaagattgctgataattccaatgcaggaattggcatagacttgggattaaaggattttgccattgtttctaatggtaagacttataagaacatcaacaagtcagcaagactgaaaaagcttgagaaacaacttattcgggaacagagatgtctctcccgtaagtatgaaaatctaaagaaaggagaagtcactcaaagggcgaatatacaaaaacaaaaactcaaggtacagaaacttcatcataagatagataatatccgtactgattacattaacaagacaatcgctgagatagtgaaaaccaagccatcttatataacgatcgaggacttaaatgtaaatggtatgatgaagaatcgacatctttcaaaagcagttgcatcacaaaagttttatgaatttagaacaaagctgcaaatcaaatgcaatgaaaatgggatcgaacttcgaatagtagatagatggtatccatcatctaaaacctgtcactgctgtggcgctatcaaaaaagatttaaagctttcagatagaatattcaaatgcagttgcggttatgtcgaagacagagatctcaatgctgcacttaatttgagagatgcataacttacgaagttgcataactaaaacgcaaacgtaagtatgtaccgaaggctattttcgggaatttacgactgcggagtgtacaagaacttgtgagtagatatgatttcggtcaatcaaaaacatacacggtgaagcagtaagtagaactcgtgagagtctacgttatctcgatgtgagtatatttacacatattttgagtggcagaagaaaaagatgtctaaaaaaattgaacgaaatgatccctgctggtgtggaagcggaaaaaaatataaaaaatgtcatgaagcatttgatgaaaaaatggaactcatgaaaaagaaggggtatgcagttcttgaccatgatctgatcaagacacctgcacagatcgagaagatcaaagagagctgcaagatcaatgttgcagttcttgattatgttgcagagcatatcggaccaggcgtgacgacacagcagattgatgactgggtacatgaagaaacagtacgtcatggcggaattccggcaccacttaattatgaaggttttccaaaaagcgtatgtacatctatcaacgaggtagtatgccacggaatcccggatgaagaaattgtcttaaaagaaggtgatattgtcaatgtagatgtatccaccatttatcagggatatttttctgattcctctcgtatgttctgtattggacaggtaagtccggagaaggagaagcttgtccgtgtgacaaaagaatgcatagagcttggccttgaacaggtaaaaccatggacaccgatcggaaatatgggaagtgctgtacacaaacatgcagtggaaaacggctatacagttgtgagagaaattggcggacatggtgtaggtcttgagtttcatgaagatccatgggtaagctacacatctaaggaagatacaggtgtactcatggtacccggaatgatctttactattgaaccaatggtcaatatgggatctgatgaaatctatacagatgagatcgatgactggacagtgaggacagaggatggtctgccatcggcacagtgggagatcatggtccttgttacagaaacaggacatgaggtcctttgctggtaaaagccatcgaaaatccggaaaaaaagtccttgcaatgagaagttatctagtgtataatcacatatgttgtgaaaaaagatggtcctctgttaccatatgtgtattaagaacatccagtataattaaggagagaaagaaatgaacgaaattattaagaacattgagtccgctcagctgaaagctgaagtaccgcagttccgcgtaggagacacagtaagagtacacgcactgatcaaagagggaacacgtgagcgtgttcagatcttcgagggtacagtacttaagagacagggtggaagcacaagagagactttcacagtaagaaagagctccaacggtgttggtgttgagaaaacatggccgcttcattccccacatgtagttaaggttgaggttatccgtcatggtaaagtacgccgtgcgaaactgaactacctgagagatcgtgtaggtaaagcagctaaggttaaagagcttgtaaaataatttcataagtaaagaggcagggacaataacatttgctattgtccctctttttacatcagtgcgtatgcgtgtaaagacacatacaggggatagaatatgggattaaataagaagattaatatcgaaaatctgaaggaaaacagagctgtttccgaagcaagggagaagcttcgtgatgacaggacaagaggaatcgtgaaatgggtgtttgaaattattgtgaccctggtttttgctgtgctggttgcaatctctgcatttcagactgtgacattgcaggaaagtgccatggaacccacgtattctgtaagtgaaaaattttttgtaaacagggctttatataaggtcagttcaccaaaacgtggagatgtgatcgtttttaaaacaagcgccagtgactcggcagccctgcatatccgacgtgtgatcggccttcccggggagactgttcaggttaaagacgggaagatctatatcaacggcaaggtttatgaagaaaacggagcttatcaggatatgacagatggaggacttgcaaatagtgctataactctggaaagcggggaatattttgtccttggtgataatcgcaataacagtgaggacagccgcttcagcgatatcggaaatatcagtaagaagtacattgtcgggaaagtttggtttacagtttctccgaaaaataaaataggttttataaaatagatcaaagtaaacagattaaagtatagataaatgaggtgaattatgaacgtacagtggtatccaggccatatgacgaaggcgaagcgtcagatgcaggaagatatcaagctgatcgatctgatcattgagcttgtagatgcaagagttcctctttccagccgaaatccggatattgatgagctgggaaaaaacaaggcgcgtatgatccttctcaacaaagcagatcttgccgatgagagacagaaccgtgcctggatggaatatttcaaagaaaaaggaatctatgcggtaagtattgattcccgcaataaaggatctatgaaggccgtttctgcggcaatcacagaggcatgtaaggaaaagacagagagagaccggagacgaggaatcaaaaaccgtccggtacgtgcgatggttgcaggaatccctaatgttggaaaatcaacatttatcaatacctttgcaggaaaagcctgtgccaagaccggtaataaaccaggagttacaaaaggaaaacagtggatacgtctgaataaaagtgtggagcttctggatacccctggaattctctggccgaaatttgaagatcaggaagttggaatgcgtcttgcctatatcggttcgatcaaggacgatattctgaacatcgaagaacttgccctgggtctgatcggatatctgcaggagttttatccggcagcgatcagagagagatacaatgtagaagaagagctgaaatcgctggatatccttactgcagttgcgaaagcaagaggatgtctgaaaaagggcgaagagcttgattatgagaaagcatcccgccttttgctggaagaatttcgttccggaaaactgggaaaagtgactctggagtttccaaaaggaccggaggaagcgtaatggaaacaatgaaagatatcaaggcacgttttgcgtcagcgaaggagggcgaatataacgccctttttcgtcattatgaaaatgatgagagaagcggtgtacagaaactgatccagcagtatcacaaaaagcttcaggctctggaggatgagcgtgtacgtacagagagcatgaagaaatatgaacatgaatatgagcatcttggatatctttgcgggatcgatgaggtgggaagaggccctcttgccggaccggtagtcgcctgtgcggtgatccttccgaaagactgcgatattttatggctgaatgattctaaaaagcttacagctaagaagagagaagaattgtacgatgtgatcctggagggagcagtttctgttggaattggaatggcaagtccggagaggattgatgagatcaatatcctgcaggcaacctatgaggcaatgcgtcaggcagtgagcaggctttctgtacagccgcagctgcttttgaacgatgcggttaccataccggaaatccagattccgcaggtacccatcatcaaaggtgatgcaaaaagtgtatccattgcggcagcaagtattgttgccaaagtgaccagagaccggatgatggaagaatatgataaggttcttccggaatacggatttgcctccaataaaggatatggttctgcagcgcatattgaagcactgaagaaatatggaccaagtccgatacatagaaaaacgtttatcacacattttgtataaaaatacttaagataccgacatcaaaaacagaaaggttttgtttatctgaaggaaaatagaagacagaagggcagctattatgaaggaattgctgcagcgttcctggaagaaaaggggctgcagatcaaggaaagaaattttcactgccgaagtggtgagatcgatcttgttgcacaggatggaagatatctggtgtttattgaagtgaaatacagaaagaacggaaagagtggaagtcctttttcagcggtagggagagaaaaacagaggatcatcagcaaagtggcaatgttttatctgattgcacatggataccgggagctgcctccctgccgttttgacgtagtaggaattgatggagagaacatccactggataaaaaatgcttttgatttttgcagttgaaaggactggtcacataagatgaaaataaaatggtataaagataaacagctaatgaatgtaaatcagaagaacaatgttacctggcttacatatcctgcttttgagaaacttcccgggatcgtacatggcttcagtacccgcctgggaggagcaagccaggggatttatgaatctatgaacttaagcttcacaagaggggatgaagagtctgcggtgcgggaaaattaccgcagactttctgctgctatgggattttccatggaagatatcgtaacctctgatcagacacacaccaccaatgtacgtgtggtcacggaagaagacagaggaaatgggatcacaaaaccaagaccttatacagatgtggatggaatgatcaccaatgtgccgggactggtgctggcaacgttttatgcggactgtgtaccacttttctttatagatccggcacatagagctgtgggattatctcattccggctggagaggtactgtaggaaagatcggaaaagtgacggtggagaagatgactgaggaatttcagacagatccttcagagctttatgcagccattggtccttctatctgtcaggattgctatgaagtcagtgaagatgtgatcgatcagtttagagaggcgtttgaagaaaaatactgggatgtgcttttttacagaaaaccagatgggaaataccagctgaatctgtgggaggcgaaccgaaggatctttctggatgcaggcataaaagaagagcggatctcaatgccgggcatctgcacctgctgtaatccgctctttctttactcacacagggcttctcacgggaaacgtggaaacctgggagcatttattactgttcgttgacttttttcatgagatccatgatcttttcgttgctggaacgaaccttctcgacagatacatcatgattgatgatatcgatgatacttgcaagatatttgctcatatttgcttcgatatagtatggacggtcaagaagctcaggaatacgatagttaaggttggttgtgatgactctgtccagccagcctttttcgtaatattcatcaaatttggctacgccgtctgtaaacagaccgtaggttgtgcagacgaatacacgtccggctttacgctctttaagctgacgggcaacatccagcatactttctccggaagagatcatatcgtcgatgatgacaacgtctttgccctctacggaatctccaaggaattcgtgagcaacgatcgggttctttccgttgacaacggtggagtaatcacggcgtttgtagaacatacccatatcgactccaaggatattggagaagtatacagcacgggacatggcaccttcatccgggctgatgatcatgagatgatcattgtcaagcttgaaatccgggacatttttgaccagagctttcaggaactggtatgttgggaaaaagttatcaaagcccttcagcgggatagagttctgtacacgtgggtcatgagcgtcaaaagtaatgatgttggaaacgcccatagcacttaactcgcgaagtgcaagtgcacagtcaagagattctctcttagtgcgtctgtgctgacgtccctcgtaaaggaatggcatgataacgttgatacggtgtgctttacctgtggctgcggagatgattctcttcagatcctggtaatggtcatccggagacatgtggttctcatgaccgcatacgctgtaagtgaggctgtaattggtcacatctaccatgatataaaggtctgttccgcggacggattccttgatgtaacccttaccctcaccggttccaaaacgtgggcattcgcagtctacaaggaaagatttctctgcatatccctgtgggatgatggcggatttcttggcggctacaagttctttacggaatttaaccagctttttgtcaacctcctcggccagttcgcggcatccggcaagtgcggcgattcggatcggggcaacaggcatagacttttccagcaattctatgtttggcataatattcctcctaagtgtatgtcattaaaaattctcagtctatttataacatcagacccacgtgtcagtcaaggtgttttctcaaagtgttgatttttaagagcaaagttgttattatatacgggatagaaaagggagataatgatgaaattaagaaagcataggatttccagggtgctgcccgacagtattgccgaggagctggggctggagccgggagacagacttgtgtctgtaaacggacagccggtggaggatgtcttcgattaccggtatctcatgaatgaagagcttgtggtgcttctggtagagaagcctgatggcgaagagtgggagctggaggtagagaaggaatatgaggaagaccttggaatagaatttgagaacggaggactgatggatgactatcgctcctgttcaaataagtgtatgttctgttttattgaccagatgccgccaggtatgcgtgagacgctgtattttaaggatgatgattctaggctttcctttcttcagggaaattatgttacgcttaccaatatgagcgagaaggatattgagcgtgtgatccgctatcatttggaaccgatcaacatttcgtttcaggcaatgaatccggaactccggtgtaaaatgctgcataaccgttttgcaggaaaggctctggataaggtggatatgctgtacaatgcaggaatcaccatgaatggacagatcgtactgtgtaagggtgtcaatgacggagacgagctggaatacagcctcgaaaagctttccgcttatgcgccggtccttcagagtgtttctgttgtaccggtaggacttaccaaatacagagaaggtctctatcctctggaaccttttaataaggaagatgctgaaaaagtcctggggcagatcgaacgctggcagaagatcatgatggagaaatatgggatccattttatccatgcttcagacgaatggtatattctggcagacagggagcttccctgtgaggatgaatatgatggatatctgcagcttgagaatggcgtgggaatgctcagacttctggaaacggaagtaaaagaaacgctggaggggctttccggtgacgaccgtaaggtgacaggcaggatcgccacaggaaaactggcagcgccttttatcgcacgctatattaaagagatccagaagaaatatcccaatgtgcagattccggtcacaaccatcgagaatcgttttttcggtgaaaagatcacggtgtccggtttgatcacagggcaggatctgaaagagcagctttccggtcttgaccttggagagaagcttctgatcccatgcagcatgctgaaaggtgatgaggagatttttctggatgacatgacgctggaagagctttcggaagcactgaacacagaaattgtaatcgtagacacaggaggacgtgatctggtgaaagctgtgatcaaccctccggaacataaacaaacaagaaggagacagatttatgagcaaaccagtagtagcgatagtgggaaggcctaatgtaggcaaatccactctgtttaacgctctggcaggtgacaatatttccatagtaaaggatacaccaggagtaacccgtgacaggatttatgcagatgtcacatggcttgacaggacatttactctgatcgatacaggcggaatcgagccggacagcagcgatatcatcctctccagaatgagagagcaggcacagatcgccattgatacggcagacgtgatcatttttatcacagatgtccgccagggtcttgtggattccgatgccaaggtggcagatatgctccgccgcagcggcaagccggtacgtcttgtagttaacaaggtagacagccaccagaaatatatgatggacgtatatgagttttacaatcttggaatcggagaaccgatcccgatttccgcagctaacagacaaggccttggagatatgctggatgaggtgatcaaagagttcccggataagagtgaagaggaagatcaggatgatattccgaagatcgccattgtaggaaagccgaacgtgggaaaatcttctctgatcaacaagcttcttggagaggagcgtgtgatcgtatccaatattgcaggaaccacacgtgatgctattgacacaaaggttacctggaacaaaaaagattatatttttatcgatactgcaggacttcgacgcaagggtaaggtaaaagaagagatcgagcgctatagtgttatccgtactgtgacagctgtagagcgtgcagatgtggttgtagttgtgatcgatgcctccgagggcgttaccgagcaggatgctaagatcgcaggaatcgctcatgacagaggaaagggtatcatcgtagcggtaaataaatgggatgccattgagaaaaatgacaagaccatctacaagcatacggaaaagatccgtcagatcctttcctttatgccatatgcacagatcatctttatctctgcaaaaacaggtcagagacttccaaagcttttcgaaaatatcgatacagttatcgaaaatcagacacttcgtatccagacaggtgttcttaatgagatcctttctgaggcagtcgctcttcagcagccgccgtctgacagaggaagaagactgaagatcttctatatgacacaggttgcggtaaaaccgccgacatttgttatctttgtcaatgacaaggaactgatgcatttttcctatgtaagatatctggagaacaagatcagggatgcatttggattttccggaacttccctgaaatttatcatccgcgaacgcggggaaaaggaataaaagtatggaacgtattatttgtcttgttatcggttatgtatgcgggctttttcagacaggctatattattggaaaagtccacaagacagatatcagagatcatggcagcgggaatgcgggtactacgaatgccttccggacctttggaaagaaagcgggagcgatcaccctgctgggagactgcctgaagtgtgtactggctattgtgatcgtgagaatggtttatggaaattccatgaatagtatccttccgctccttaccctttatgcagcattgggatgtatccttggccacaattttccgatttctatggaatttcgcggtggaaagggaattgctgcttctgtaggcatgatcattgcttttgactggcggatatttattgtatgtgcagttgtcttttttgcactgttctttacaactcattatgtatcgctttgctctctcagtgcatatgcggtggcttttatcctggtcctggtttttggacatatgggaaaatatgggatggatcaggcgcatactgttgagctttatatcgtgatggtagttcttacagcaatggcgttctacagacacagggcaaacattgtaagattgtttcatggaacagagaataaggtgtttttaagcagtaagaataaaaaataagaggtaagatttatggcaaaaatcagcgtactgggttcggggagctggggattagccctggcactcctgttgcataataatggccatgaagtccttctttggtcagcaagaccggagaatgcccggaaactccgggaaaaaagagaaaatcctgacaggcttccgggggtgcggcttccggatgaaatcgatgtcctgacagatctggagcgtgcgcttaaggatgtggatgtaacagttctggcagtagcttccccgtatatccggagtactgcacacaagatggcatcgtttgtatgcagggaccagaagatcgtcaatgttgcaaaaggtattgaggaaaagacactgaaaacactcagcgaggtgatcgaagaagaaatcccgcagggtaatgtagctgtactttccggtccaagccatgcggaagaagtaggacgcggacttcctacaacctgcgtgatcagcgcacatacacaggaaactgcggaataccttcagagtatttttatgagccctgtgttccgcgtgtatacaacaccggatatccttggggtggaacttggcggagcactgaaaaatgtgatcgcactggcagcaggtactgccgacggccttggatatggagataataccaaggcggcactgatcaccaggggaatcacggaaataggaagacttggtaaaaaaatgggggcgcagatggaaaccttttacggcctgtccgggatcggcgacctgatcgtgacttgtgcaagtaagcatagccgtaatcgaaaggccggatatctgatcggccagggatatacgatggaagaagctatgaaagaagtgcagatggttgtggaaggcgtttattctgcaagagctgcaagagagcttgcggagaaatatgaggtggagatgcctatcataacggaagtgaaccgcgtactgtttgaaggaaaatcagcagcggaagcagtaatggacctgatgctgcgtgataaaaaagtggaaacgcccatgctcccgtgggaaaatgcgtgagcggatcagttaaatatttccgggtttcagatatgtgaaatgctaagctgggaataacaggatcgccgtatcaactgaaaagaaaaaataaaaagatatctgccagaagatcacttatgctctgacagatatcttttttgcattattatggaaattaaaactgaatatcacggagatcttctggaacatgagaagtatgcagatcttcgttcagtgtatcgatgatcgccatatcttcatcctcgatattgaagtcaaagatgtttccattgctgcggattcgttccgggttgatggatttcggaatgacagaaattcccttctgtattgcccagcgaagcccgatctgtgcaggagtcctggcatatttggtccccagaacacacattacatcattatcaaaatatgcacctcttgccagaggagcataagcctgtacctgaataccgaaagccttgcagtattcgatcagttcagcagggtaacacaaaggatggcactcaatctggtttacagcaggaataaccccggatatcttacgaagttcttccagatgccggatatcaaaattactgacgccgatacttaaagcacgtccagattccagaatggattccagctctttccaggtgctcaaatagcagccgggaaccggccagtgtatcagatagagatctacataactgactttcagacggtcgagactacgggaaaaagctccctggacatcgccgagacgctgcgcattgttccagattttgctggtgatgaaaagatcctttctgggaactccgcatttggcaatggcacgtccaacgctttcttcatttttataaacagaagcggtatcgatcatgcggtagccggcggaaatagcagaagtgactgctgcttcggcctgtacgtcatcgggcaacttgtatacgccaagccccagaagaggcatttctctgtcgttgttcagaaaaacagtttctttcaaaataattcctccttgtatgttctgctttccatgcttttgctattatagcacaaaaatatgaaagaatcacatcaattatattacaaaagtgataaagcttagagttggacagacgcgcagactgggtaataagttgtggtttgaagagactaacttcgttaaaaatgaaacaatcgagttaatttactgtcaaagtttttggaaaaataggaaaaacagcatataattttggctatattttataattattttcttgataataacagtgaaaagatgtataataaatttaattgataaattcttgtcatgagagtgtccgcccggcggatacaggaaaggggtatttatgcatttaatcaaagatgagaatggcaatcttgttcagcatggacatgcagacagccatgaacatacacatgagcacacccatgaggacggtgtgactcacagccatacacacagccatgcggaaggagataaccattgtcatacacacggtgatggacactgcggttcctgcgagagcggtgactgcaagaatgagactgtagcacttcttacctacatgctgcagcataatgagcatcatgccgcagaacttgatcagatggctgacaatcttaagaagcttaacatggatgcagctgcgaagacgatcaaagaggcagttgcagattttcagaaaggcaatatgagacttggacttgcccttacacttgttaaggaagagttgaaataaaaaccgacagaatagttttgacagcatagtggttaaatgatgccacttatttggaggaatgattatgtgtcttgcaacagtatataaggaagaagataattctgtgatctttaagaatgtaagccggatcgatgtggacggaaataaattgatccttcgagatatcatgggagatgagcgcgtggtagaaggcagtatccttatggtggatcttgcaaacagcatcgtgaaactgcagtgtaactgatatgattaaaacgtaagatgtggagggacgatcgatgaaattatctgaagcaatgagagaaaaaatgttgctttcctttgaactttttccgccaaagacagaaaaaggcatggcaaatctgccgggaaccattgaacatctcatgaagtatagaccggagtatatttcctgtacatacggtgccggcggcggaaatgtcggagccaacagggaagtatgccagatgatcaggaatgcaggaactattcctgtaacacacttcacagtgatcaagaacacaaaagaaggaatcagacagcagttggaacggtatctggcagatggcgttgaccatatgctggcgcttcgcggagatattccgcttggtgagacaacgacctgcggagacttcaattatgcgacagaccttgttaaatttgtccgtaatgaatttggcgataagtttgagatcgcagtagccggttcaccggaaggccatatcgcatgcagaagcttggaggctgatattgctgttttgagacagaaacaggacaatggtgctgattatatcatgactcagctctgctgggatatggaacagtttaaatactggttggacgctatccgcgaggctggggtgacaatgcctgtagatgttggcgtgatgccgatcttggaccaggcagctaccattaatatggctctttcacgtaacggctgtgtaatggacagtgagctttgcaggctgatctccaggaactggctgttcccgaatccgtttaacgctaaagatgctgatggtaaaccatttgacatgttctatgaggacaaggttaaacgattcaaagaagaaggaatcgaatacaccatcagacagatcgatgagtatcgcgctcttggtgttgacggtatccatctttatgcattaaacaaatggaaagacgtatccgagatcattgacagatccggacttcgtacacttatctaatcatcaacgaaataaataagaattccggcacgatgcggaggtgccagaacagtatcaggcacctcccttatgcgccggcataacagatataaaatcaggaggtgcccgttttatggcacatgttattgcagtcgccggaaaaggcggcgttggaaaaactacattatgcggaatgctgatccagtatctctgcgaaaagaaaaaaggacctgtactggcggtagatgcagatgccaattcaaatctgaacgaggttcttggcgtagaagtagatacaactcttggcgatgtacgtgaggagatcgcacatgctgagatgacagagaaaagcccgatccccaaaggaatgtccaaggcagattatgcagaggtacgtttcgaggatgctcttgctgaggaagatgattacgatcttcttgtaatgggaagaacccagggaaaaggatgctattgctttgtaaacggtctgcttcaggcacagcttgccaaataccagaagaattatccatatattgttgtggacaatgaagcagggatggaacatatcagcagaggaatccttccgagcatggagacagcaatccttgtaagtgactgttccagaagaggtgtacaggcagttggcaggatcgcagaacttattaaggaatgcgatatgaagccttccagagtgggtcttattatcaaccgcgcgccaaaagcagaactgaatccaggaatccttgaggagatccggaatcagggtctcgatctgatcggtgtggtaccacaggatgaggcagtttatgaatatgactgcgatggtaaaccaaccgttactcttcctgaggataatccgatgagaaaagcagcttttgaaatttttgataaattaggtttataatggaatataaacctttttttataaaagagaataacccatgggtggggatgggttcctgccctgggcttattataaaaagaaaaataaaaatagatgtgctattaaaggaggtctataatgagtgaattcaaattaactacagtggaggaatttgaagccgctacagcccgtcttctcgagacaggtgcaaaggtaggagcagatgcatggcagatccgtgcaaagaaccagactccgcactgtaaattcggtgagcagggtatctgctgccgtatctgtgcaatgggaccgtgtcgtattacaccgaaggctccgagaggaatctgtggatgtgatgctcatggtatcgtaggaagaaacttccttaaatttacagccggtggtgcagctactcactccgatcatggtcgtgagatctgccatacactgtactgtgcaaaagagggcggaaattatcaggtaaaagatcctgagaaactgcttcgcatcgccaaagagtggggcgtggaaacagaaggcaaggatatctatgatctggctcatgagatggctgagatcggtcttatggaatatggtaaaccgttcggatatcagagattccttgacagaatgccagcaggacagaaagaaaaactgatcgagaacgaagtcgcaccacgtgctatcgaccgtgaggttgcaagttctctgcatatgagtcatatgggatgttcttctcttccggaagcacttgtaaaacagtctattcgttgcggcatggctgatggatggggcggttccatgatgggaacagagttctctgatgtattattcggaactccgaagccgattgatacagaggctaaccttggagtaatggttgaagagaacgtaaatattgttgtacatggacatgatccgagtctttctgagatgatctgtgagtatgcagacagcaaagaaatgatcgattatgcaaaatctgtaggagcaaaaggaatcacagtttccggtgtgtgctgtacttctaacgaggtagctatgcgtcgtggtgttccgatggctggtaacttcctgcagcaggagaacgtagtgctgacaggtgcctgcgaggcgatcgtagttgatgttcagtgtatcttccctgcattaggacctctgagcaaatgcttccatactaaatttgttacaacttctccgatcgctcagatgccggattctgaatttatcagattcaacgctgagacagcaggagaaaatgcaaaagcaatcgttaagatggctatcgataacttcaagaacagaaaacctgagcttgtacatatcccacagctgaaacagaaagctactgttggttattcagtagaagcgatcgttaaagttcttgatggtgttacaaactctcaggttgatgtaacaggaacaaccaaaccattacttgagtgcatcacttccggtgttatccgtggtgctgttgctatggttggatgtaacaatcctaagatccgtcctgactatgcacatatcgaactgatgaagaagtgtatcgcaaatgatatcattatcatcgcttccggatgttccgcacaggcagctgctaaagctggtctgatggacaaatccgcaagagatctctgcggtgcaggtctgaaacgtgtctgtgagctggctgatatcccaccagtacttcatatgggatcctgcgtagatatctcccgtatgatgatcctggctgctgaacttgcaaaagatgcaggacttcagatcaatcagcttcctgtagtaggatgtgctcctgagtggatgtctgaaaaagctgtatccatcggtaactacgtagttggtactggtattgatacattccttggtgttgatccatatgtttccggttcttcagaaatgtgcgagcttcttacagagggaacaagaaaatggacaggtgctgcttacacagtagagacagacatcgagaaattagttgatcttatgatcgagagaattgaagagaagagaacagcattaggaatctaatccgttgcgatctttaaaatgttataaaaggtggaagacgtaaaatgaaaatagcagtaaccggtaaaggcggagtaggaaagacaactttcgcagcaacacttgcaagactatacgcagatgagggaaaaaaagtccttgcggcggatgtggatccggatgcgaacctgggtcttgcccttggatttgacgaggaaaccttggattctattgttccaatctcaaaaatgcgtaagctcatagaagaacgcaccggagccaacagccagaatcagttttataaactgaacccaaaggtagacgatattccggatacttatggaaaaacctgtaatggcgtaaagctgcttgtccttggaactgtggaaacaggtggaggcggatgcgtctgtcctgaacatgtgatgcttaaaagagtgatcaataaccttgtgatccacagagatgatgtggtgatcatggatatggaggccggcctggaacatctgggccggggcaccacggagagcatggatgaatttattgtagtgatcgaaccaggggcaagaagtgtacagacatataagaatgttaaacgtcttgcaaaggatctgggagtttctcaggttaaggtcgtggccaataaggtaagaaatccggaggatgaggaatttattcggagtaagatcccggcagaggatctgcttggaatgatccactacaatacagaagttatagatgctgatcgtcaggggaaatctccctacgatttcagtgaaactgtaacagctgaaatcagaaaaatcaaagacaaaattgatcagaattcaattctgtaaaaataggaggtattacagtgactttatttgatagagtattcggcggaaacgatgctgtatatggtttaacagagggtgctattgacggcgcgatcgctcagtatggcgaagacaaagctgtcagcttcccgaataccgcttacagccttccttgctactatgctgtaacaggaacaaaagttacaacattaaaagaattaaaagaagctcttggcgttgtaaaaacacttatgacaagagagaaaagactgaacgatgcattcatgtccggtgttgctacagcactctgcgcagagttcatcgaggttctgaaatatatcgacggagcaactccttacgaagagccatgctatggacatcttggtgatgctgttatccgtgagctcggtgtaccgcttgtaacaggcgatatcccaggcgttgctgttatccttggtgctgctcctactacagaagagggtgttgctcttgtaaagagctatcaggcacagggtatcctggtaacacttgttggcggaatcattgatcaggttgcagaagccggaatgaagacaggtgccaacgttcgtgttattcctcttggaaaagatgttacatctgttgttcatgtagtttccgttgcgatccgtgcagctctgatcttcggtaacgtaacacctggagatgcaggaacacttatgaaatacacaatggatcgtgtaccggcatttgttaacgcattcaaacctctggatgatgtgatcgtagcatgcggtgcaggcgctatcgcacttggattcccggttgttacaaatgagacagagaatatcttccgtgtaccgaagagccttatcgttcaggaggacgtaagtaaatttaacgctacttctcttgaggcgcgtgatattaagatcaagatcacaaatattgatattccggttgctttcgcatctgcattcgagggtgagatcatccgtcgtaaagatatgcaggttgagttcgatggctcccgtgtagactgtgcagagcttgtacatacctgcgatgcttctgagatcgaggatcacaagatcacagtaatcggacctgaagtagatgagatggaattcggcagcaagaacagcattgcatatgttgttaaagttgcaggtaagaatatgcagcctgactttgagccggttatcgagcgtaaattccacaactacatcaactgtatcgagggtgtataccatacaggacagcgtgatatgcagcgtattcgtatcagcattgacgcatttaatgcaggattcagaatcaaacatatcggtgaagttctttatgcatctgttaaaaatgagttcgatgcagttgttgataaatgtgaggttgttatctatacagatcctgctgagtgtacaagaatccgtcatgaggttgcaattccgatctttgacaaacgtgatgagcgtcttgatactctgacagatgagtctgttgacgtatattacagctgtatcctttgccaggcattcgcaccaagccacgtatgtgtagtaacacctgagagacttggtctttgcggtgcggtttcatggctggatgcaaaagctacacatcagcttgacccggctggtccttgccagatcattacaaaagagcgtccgatcgatgagaatcttggttcttatgaggacgttgatgaggcagttcagaaattctcccagggtgctctggagcatgttacactgtactccatcatgcaggatccgatgacttcctgcggatgcttcgagtgtatctgtggtatcgagccattctccaacggtgttgttattgctaaccgtgagtatgcaggtatgacaccacttggaatgacattccctgagatggcatccatgacaggtggtggagttcagacacctggattcatgggacatggtaaacatttcatttcctccaagaagttcatgaaggctgagggcggtatcgagcgtatcgtatggatgccgaaagaactgaaagaattcgtagctgacagacttaataagactgcaaaagagctttacggaatcgataactttacagacatgatcggtgatgagacgatcgcagaagatccggagacactggttgcattccttacagaaaaaggacatccggctctcggacttgatccgatgatgtaatttatccgggagaaaggatgtgcggacatcctttctcctgtaaactgttaaaaagtttgttgattttttaacagaaatatagtgctgcatcttgccaataactggtgctatgtagtataatataagaagctctgtagtttttaattattatttttaaggaggctaacgaaaaatgccgtttaatcagaaaccacaaaagttcaatgcaaagattaatgctgtcacaatcggaagcggagataagactgtgacaattggtggggattgtacattcccattttattcctttgacgcagagtcagagaactgcccgaagatcggtgtagagatctctgatatgggtcttgagggcgtatctgaaggtatcaaagcttactatgaaggcgctactacaatggctgacattgctaagaaagctgcagctatggagggtgctgactttgttgcacttattcttgagggcggcgacccgaacggtgttaacaaatctatcgatgagctgatcgcagttgttaaagaagttgcagatgcagttgactgtccactggttgtagagggctgcaagaatgttgagaaggatgcagagctccttccgaaggttgcagaggctcttcagggcagaaatgcactgatcctttccgagaaagaggagaactacaaagcaatcggtgcagcagcaggtcttgcttacaatcagatcgtaggcgctgagtctgccgttgatatcaaccttgctaaacagcttaacgttgttactacacagcttggtgtagatgcaaagaagatcgttatgaatatcggtagtgcagcagttggttatggatatgagtacgtagtatctactatggaccgtatcaaaggtgccgctttaggccagaatgataacatgctgcagatgcctattattacacctgtatccgctgagacatggaatgttaaagaggcaatggcttctgaagcagacatgccggcatggggaccacaggacgagcgtggaatcgacatggaagttgagacagcagcagctgatcttgcagctggttctgatgcagttatcttaagacatccggaatctgttaagacaatttccaagctgatcaaagcacttgcgtaataaataggaggataaagagctatggcactgaatggtattcagatctttaaattaacaccaaagaaaaactgtaaggaatgtggatgccctacatgtatggctttctctatgaaagttgcacagggcgctatgaaaattgagcagtgtcctcatatgtccgaggatgcattagcatctctttctgaggcaactgcaccgccaatgaaaactatcaagatcggaacaggcgatggagagtttacacttggtggagagactgttcttttcagacatgagaagacatttgtaagcaaaacaagatatgccgtatcactttgcacatgcatgagtgatgaagaagtagaagcaaaacttgcagagatcccacacgttgactatgatcgtatcggtgagagaatgcatgtagagcttgtttatgtaaactgcgatgagaatgcagatgctgcaaaatttacagcacttgtagagaaggctaaaggtcttggaagaacactgatccttggctgtacagatcctgagatcgcaaaagctgcccttgaagtatgtaaggacggcaaaccggttcttaacggagcaaacgcttccaactacgaggcaatgagcaaggttgctacagatgcaggcgtagttctcggtgtatccggtaaggacattaatgagttatatgatactacagcagctattgagaaacttggcaacaagaatctcgtacttgatacaacaggagctgacatcaaagagacctttgcaaatactgtacaggttcgtcgtgcagctcttaagaatcaggacagaacatttggttatccttctatcgttaaccttgttaaacttgcgaagggtgacaaacatttacaggcagcacttgcttccatgtttactatgaaatatggttctatcatcgttatggagcagatgacatatgcagaggcacttccgctgttcggtcttcgtcagaacgtatttacagacccgcagaagccaatgaaggtagaaccgggcatttatcctctgaacggagcagacgagaattctctcgttgtaacaacagtagactttgctcttacatatttcgtagtatctggcgagctggagcgttccggtgttccgcttaacctggtgatcaatgatgcaggcggactttccgtacttacatcctgggcagcaggtaaattctccggaaacagcatctccgagtatatcaaagagaatgttgagccgaaggttaaatgcagaagactggttattcctggtaaagtagcagttcttaagggcgatcttgaggctaagcttcctggatgggagatcatcgtaggaccaagagaagcagtacagcttgtgaaattcttaaaagaccttgatgcataaacttaaggtttaagaaatcagctgtccggcaatatcgccggcagttataaacggctgtgcaggtttgctacacagccatatcctactaatatgtaaaggagaacacgagtatggcaaaatttgtaacaattggggagagactttcaacaacagcaccggcagtaaataaagcatttactgagagagatcctgagccgatcatcaaaagagcaaaacagcagcttgatgcaggcgctacatatcttgacgtaaatatcggacctgctgagaacgatggcgaggaccttatgaaatgggcagtacagctccttcagtctgagtttgacaatgttccgcttgctctggatactacaaaccagaaagctattgaggctggtatttccgtatacaacagaagcaaaggtaaaccgatcgtaaactctgcagatgctggagacagaatttccaatatcgaccttgcagcagctaacgatgcgatctgtatcgcactttgctcttccggtatggttgcatcagacaatgacgagcgtatgatgcactgccagaacatgcttgagagaggtcttggccttggtatggaagcagaggatctctggtttgatccgcttttccttgttgtaaaaggaatgcaggacaaacagatggaagttcttgaggcaatcaagatgttctccgagatgggtctgaactccactggcggtctttccaacaacagtaacggtatgccaaaacatatccgtccgatcatggactctgctcttgtagctatggctatgatgaatggtcttacatctgcaatcgttaaccctaacgaccttcgtcttatggagacaatcaaatcctgtgacgtattcaagggtaacacactttacgcagattcttaccttgagatctaatttggcgtgtgaacaaaacaggagcgctgtttcagaggctgggggcttcggccttcagcctcttttttactaatatagtttagtctaactcccaacgccacaggtggaagacgaataacttttacgaggcgagaaaggtggttgccgaatgtttaaggtgacttttgcttttgaaaatggcagtacggtagaagcatttgccaatgcgggggataatttactggaggttgctcgtagtgccaatgtggctatcgatgcaccatgttccggaaacggagcctgtggaaaatgtcgggtacagttaaaaagcggagaactggactcaaagaaaactcttcatatttcggatgaagaatatggcgcaggctggcgtctggcctgtatgagcaagatcagtgcagatgtggaggttcttgttccggatattgcatccgcatataagagccgaatgaaagtggctgatttgagctcaaaagaagaaatcgctatttttgaaaatgccaagcatgaagttgagatggctggcatagaacttacaaacagtcttgatgttgtggaacttcagatggatattccatcactggatgataccatgccggataatgaaagactgacccgtgcacttcagaagtttatgaacctgaagcgtgtcagaattccgtatgcggtgcttaagaagcttccagatgtacttcgtgagagtaaattttctgtgaagtgcgtggttcgtacagcaccaaatgacatgtatgtttatgatatttttgacagtaagaaagatgttgtgatcggtggtcttgctgtagatatcggtaccacaaccgtttcggcagtcctgatcaatatggaaacaggagagatcctggccaagagttcttccggaaacggacagatccgttttggtgcggatgttatcaaccgtatcatcgaatctcagaaacctggcggaaagaagaaacttcaggacgcggtgatcaaagagaccattaacccgatgatccatgagatgtgcagaagcattcatttcccggagaaacagatctaccggatgtgtgttgcttctaatacaaccatgaatcatctgtttgcagggatcaatgcggatccgcttcgtatggaaccgtatattcctacgtttttcaaaacaaattccttgtttgcatcggatgtgggaattgagatcaatccggatgcacatattatcatggctccgaatatcggaagctatgtaggtggagatatcactgccggtacactggtaagtatgatctggaacagaccggaattttctctgtttatcgaccttggtactaacggagagcttgtattcggtaattccgattttatgatgagctgtgcatgttccgcaggtcctgcctttgagggtggagatatcagctgtggtatgcgtgctacagacggtgctattgaggcatgtaccattgataaagaaactatggagccgacatataaggttgtaggtgaacctggaaccaaaccggtaggactttgcggttccggtatcattgatgtgatcagtgaactttttatgacaggaatcatcaatccgaagggaaaatttgtccgtgaaggcaaaagaatccgtcacgatcattatggtatgggaagctatgtgatcgcgtttgaagaggaagccggttctgccaaggatgttgagatcacagaagtagatattgataactttattcgtgccaaaggcgctattttctcagcaatccgtaccatgttgaattctcttgacttcgatgtttccatgatcgacgatgtatatgttgccggtggaatcggaagcggaatcaatatggccaatgcagtgcatatcggaatgttcccggatattcctcttgagaagttccattacattggaaactcttctcttacaggtgcttatctgatgcttcattccacatcagcagagaagaaaacctatgaactggcttccaatatgacttacctggagctttctacagttcctacctatatggatgagtttgtaggtgcatgctttattccgcatacggacacaaatctgtttccgtctgttatggaagaacagcagaagagataaagcagactaaaacagcagaggtaaaacatggcttttagtataaatgacttgaattatgaaaaagacagcaaagaaagaatgccttgggagcattatacagaggagttcgctaaggcagacccggcagaaattgccggacgtctttcgcttccttatgacgaagagaagaaagaactgactctgaaattcctgggaagcgtttattatatttcctggccggattttcagataactcatgaggaagatgatgcgggattttatcctcttgaggaaatgcattatgcaaagatcctagctatccgttttctgctgaacgggaatgtatctcagggaagcggaaggtttaaaacatacagggaaatgccctggggagaggtttatctccgtcagtttgatggcaggtgcatcaaacgcctggctttcacatacggaaacagacttaaggatttcaaggagatcatggaacacatccatgcggttcccgtggatcatggagatattgcataccaggtggagatctttccgggatatgtagttcagatgatcctctgggagggcgatgatgagttcccgccgtcttcgcagatcttgttttccgataattttccggtttcctttgcggctgaggatatggccgttatgggagacgttatcattgggtctttaaaggcatttctgaaatgtctttaaaaatgaaaaatagttaagaacaggatgggacctgtttttatagaaatgcagttttaagggattaaaaactgtaaaaatacctaaagggaggtaacattatgggattcaaaagtgacatcgaaattgcacaggagtgcgaaatgcttccaattacacagattgcagagaaggcaggtattgatgacaaatatctggagcagtacggtaagtacaaagcaaaaattgattacaatctgttaaaagagagtgacaagaaagatggtaagctgatcctcgtaacagctatcaacccgacacctgcaggagagggaaaaacaacaacaaccgttggtcttgcagatgcaatgcagaaaatgggcaaaaaagtaatggtagctcttcgtgagccatccctcggaccggtattcggtgtaaaaggtggtgcagcaggcggcggttatgcacaggtagttccgatggaggatatcaaccttcactttaccggtgacttccatgcgatcggtgcggcaaacaaccttcttgcagcaatgatcgacaaccatatcttccagggcaatgacctgaacattgacccgagaaagatcacatggagacgttgcgtggacatgaacgaccgtcagcttcgtaatgtagtagatggtcttggcggaagaacaaacggtatgcctcgtgaagacggatacgacatcacagttgcatctgagatcatggcagttctttgcctcgcaagtgacatcaaagacctgaaagagagactttccagaatcatcatcggatatacctatggtaaagtttccgagcagaaaccggtaacagctggtgatcttcatgcagagggtgctatgacagcacttctgaaagatgccctgaaaccaaaccttgtacagacactggagcatgttcctgcaatcgtacacggcggaccattcgcaaacatcgctcatggatgtaactccgtaacagctacaaagatggctatgaaacttgcagattatgctatcacagaggctggattcggtgctgaccttggtgcagagaaattccttgacatcaagtgtcgtatggcaggccttcatccaagcgcagttgttatcgtagctactgttcgtgcactgaaatacaacggtggtgttccgaaggcagatctgaacaacgagaaccttgaggctcttgagaaaggtcttccaaaccttctgaaacatgtaagcaatatcaagaatgtatacaaacttccatgtgtagttgctatcaatgcattcccgaccgataccaaggcagagcttgacctggttgaggcaaaatgtaaagagcttggcgttaacgttgcactttccgaggtatgggcaaaaggcggcgaaggcggcatgaagcttgctgaggaagtaatccgtcttgttgaggagccgaatgacttcacatatgcttatgagcttgagggatccatcgaggataaactgaataacatcgtacagaaagtttacggtggtaagaaagttgttcttacagcaaatgctcagaaacaggcaaaacagctggaaacacttggatttggcaactgcccgatctgtgttgctaagacacagtacagtctgactgatgatcagacaaaacttggtgcaccgacagactttgaggtaacagtacgtaacctgaagatttccgcaggtgcaggattcatcgttgctctgacaggtgagatcatgactatgccaggtctcccgaaagttccggcagcaaccaagatcgatgtagatgagacaggtaagatcacaggtctcttctaatcggaacataagatcaaaaacaaccggagggggctttttataaagcccccaatgggctctaaagagtgctaaaataagaatataaggaggagagtcctatgggattttctaccagtacatgtactgaatttgtcgaggtattaagctccaaggcaccggttccaggcggcggcggtgcatctgcccttgtagctgctgttggtacagctcttggaaatatggttggaagccttactgtcggtaagaaaaaatatgcagatgtagaagatgaaatgtgggagctgaaaaagaaatgtgatcagcttcagaaagatttccttcatctgatcgagagagatgcggaagtttttgagcctctttccaaggcttacggaatgccgagagagacagaagaagagaaggctgagaaggctcgagtaatggaagctgccctcaaggaagcatgctctgttcctatggagatcatggagaaatgctgcgaggctattgaacttatcgttgagttcggagcaaaaggttctaagcttgcaatcagtgatgctggtgtaggtgctgcattctgcaaagcagctcttaagggagcaagcctgaatgtgtacattaacacaaaatctatggctgaccgtgcgtatgcagaggaattaaacaaaaaagcagacgctatgcttgagaaatatacaaagatcgcagacgagacatttgacagtgttctcggaagactgaaataggaggaaccagacaaatggcaaagcagttattaggtaaagaagtaacagcggctctcaatgaaaagatcaaagcgaacgttgcagagcttcaggcaaaaggtgtagatcctacactttgcattatccgtgttggtgagaatccaagcgatatttcctatgagagaggtgctacaaagcgctgtgagactcttggtgttgcatgtgagaaaatccttcttccggaggatgtttcacaggatgagcttcttgcaaccatcgataaagtaaacaaagatgacaagatccatggagttcttctgttccgtccgctgccaaaacatctggatcaggcagtgatcgagaatgcacttgcagcagagaaggatgttgactgtatgacagatctttccatgtctggtgtatttacaggcaagaagatcggattcccgccatgtacaccgcaggcatgcatggagatccttgatcactatggaatcgactgcacaggcaaaaaagcggttgttatcggaagaagtcttgtagttggtaaaccggctgccatgatgcttgttaagaaaaatgcgacagtaacgatctgccatacaagaaccgttgatatgccgtctgttgcaaaagaggcggatatcgtcatcgttgcagctggtcgtgctggtgttgtcggcgctgattatgtcagagagggacagactattatcgatgttggtatcaatgtcaatgcagagggcaagctttgtggtgatgttgattatgcggcagttgagccaatcgttgatgcgatcacaccggttcctggcggagtaggaagtgttacaacttctgttcttgtaggtcatgtggttgaagctgcaatgagaaaagcgcagtaataacagtaataaaggattgatcatttatatatgtacagattccgaattagtttttgtttacggatgatggtacttgcaggcgttctggtgttcggaacgcctgcaggtgttttggcagaggaagcggatcattctatggagggtcagatttcgaagcctcagtcatctggagagagtgatacagagggttttgtggatgattccacagataatacttatggatattatacgatcatggggtgtaccacagtggatgcggaggatatggtagtgcagtatgaggcgcagaatgtggagtatccttccggcatcctgacggagggtggtgcaccggatattgatacgttttgcacgattgtgatagaggaagcggatgcggagggcgtccgtggagaggttgtttttgagcaggccatgcttgagaccggatggcttcagtttggtggggatgccagtgcggggcagtttaatttttcggggctgggaactaccggtggtggtgttgccggtaattcttttcctgatgtaaggacgggaattcgggcgcaggtgcagcatctgaaggcttatgcttcttcggaggagctgaaccaggcttgtgtggataatcggttccagtatgtttcccgtgagagtgcgccttatgtggagtggcttgggatccaggagaatccttatgggggcggatgggccgccgggaggaattatggatataagcttaggagtcttctggcggagttgaagggggaggagtatacctggccggagagtacggagacggtggagaagtagtggtggtggcgaaccgcactcccttccgggcctgtgcgttggcggtgttaggttgtctggctatggggaaggatgtggatgagggatggaggcgggctttgccctgtcctggttgataaaaaatggagatgtaacctggatttttaatcatctaggttgcatctccgttttttatttaataatgcttaaaaagtatttcgatatattgggggtatttagttcaactccaggttttccagttcctgtgaggggagttttggttctgagctgtctacgtattttttgagggctttggaggtttttgcgaagccggcgttggttccggcgcctccgatgcagcctccggggcaggccattccttcgatcatgcagtttttgatcttgccggcttttgccagagtgaggacttttttgcattcggcaaggctttctgcgtgttcgatgtggactggtacatcgggatagtattccttcagacagttttcgatggctccggctacgccgcctgcaatggcgtagcctcgtcctgctgcggttgcggcctgggtttcttccgggagctcttcgcaggtggatggggtgatgcttttggcgtcgaacaggccccagagttcctcgaaggtgatcacgaagtctacatcacttcttacggaatgtcgcatggcttccagttttttggaggcgcatggtccgatgaagactacttttgcgctggggtgttctttttttacaatgcgggcagttgccaccatcggggtcagctcctgggagatgttgtcgatcatagccgggaagtatttctttgccatgacggaccaggacgggcagcaggaagtgaggaggaacgggaggttgccggtggctacttctttggcgtagtggtgtgcctcagagatgcagccgatgtctgcgcccagtgctacctcgtaaatgtttgagaagcccagctgtttaagggcggagcggaatttgcccggggtgacgtcttcgccgaactggttgatgtaggcgggggcgatttctgcaatgatctcagttccttctcgaagggcgtgggacagctggaagatctgggatttgtcggagatagctccgaatggacagctgaccatgcacatgccgcaggatacgcatttatcctggttgatggaggcgcgtccctgttcatcgctctcgatggcttttacaccgcaggcacgttcgcaggggcgttctttatgggcgatggcatcgtaaggacagacagctttgcatcttccgcaatggatacatttgtcctggtcgatgaaggattttccgtttaccatggaaatggcgcctttggggcaggtgagtaaacagggatgtgcgacacagccgcggcacatgttgctgacttcgtatttgttggattcgcatgcggaacatgcggaagggatcacctgcataagaggtggttcataatatttctcgtcaatgttgctggccttcacgccatcggtaaggtggacggaacgattttccgggcggagggaaagtcccatggccagacggacacgttcgcttgcaacagctctttcacgatagatgctttcgcggtatttcgcgcgttcctctacaatattgtagggaatggattcgatatcatggatcattgattcgtccgtggattcaaatccgatcttagcaatttcggtaaaaatctttcgccggatctgttttactggtgtgtcaagatttcgcatagatgttctcctttacaaaataaattaattaaatgttttccacgcactttttatctatcttaaagtaattgagaaataaaatcaataaccggctttaatgttttggggcagaaacaaagagcagatttgtatctttattatcaaggctgttaaaaattgaacatattttatggaaaatagatacaaaatcagtaagccactgtaaacatttcaatatattctgaaaaaagcaaaaaaaccgcttgtgaaaaatgaccatataagttataattaaaggcatgaaatggtgcaaaataatgatttgcataaatgcgcggcactgacagagtgttaaagcattaacctgtagtggaacaggttgatcaagtggaaaatctatgagaaacaaggagggaaccgaatgttagaccagacgtattacagaaaaacggacgagatcatcgagcactacggccggaaagctgcatcactgattccgatcatgcaggatattcaggctgagtaccgttatcttccgggagagcttcttacttatgttgcggaacagattggtgtaaaagaagcgaaggcgtacagtgtagctactttctatgaaaacttttcctttgagccgaagggcaagtacatcatcaaggtatgtgacggtactgcctgtcatgtacgtaagtccatgcctgtaaaggaagcaatgctgaaggaacttggactgagtcataagaagcatactacagatgatatgatgtttaccgttgagacagtttcctgtcttggtgcctgcggacttgcaccgacactgactgtaaatgatgaagttcacccgaagatgactcctgagaaggctgttgagcttttaaatgaattgagaggtgagagcgtatgagtataaccagtatggaagatctgaaaaacaaacaggctgaggttaagaagaatcttgatggctatacctgccgtgttctcgtctgttccggtaccggatgtattgcttccggtgctcagaagatttatgaagaaatgtcaagactctgtgagggaatcgagggtgttgcggttgagatgcagaaggatgttcctcatgtaggaatcgttaagaccggatgccagggcttatgtgaacttggtcctcttatgagaattgagccctatgattatcagtatgtacatgttcaggtagacgactgtcgcgagatcgtagagaagaccgtgatctgcggactgcctgttgagcgtctgttttatcgtcataatgatgaggcctgtccacatcccagtgacattccgttcctgaaccagcagacaaggatcgttcttgagaactgtggcaagatcgatgcagagtccattgatgaatatatttccgtaggcggattttccgctatggcgaaggctttctttgagatgaccccacagggtgttatcgacgagatctcgaagtctggtctccgcggccgtggcggtgcaggcttccctgcaggcaagaaatggtcacaggttgcacgccagccggaaaaagtccgttatgtagtatgtaacggtgatgagggtgacccgggagcatttatggatggttccgtaatggaaggtgatccttacaagatgatcgagggtatggtgatcgctgcctatgcagtaggtgcagaagatggttatatttatgtgcgtgccgagtatcctctttctgtacagagacttcgaatggctattgagcaggcagagtcctatggccttcttggtgataatatccttggttccggtattaatttccacttacatatcaatcgcggtgccggagcgttcgtatgtggtgaaggttctgccctgactgcttctatcgaaggcaacagaggtatgcctcgagtaaaacctccgagaacggttgagcagggcctgtggggtaaacctacggttctgaataacgtagagacttatgccaacgtaccgaagattatccttcagggagcagactggttccacaccatcggtacagagggaagccctggaaccaagactttctcacttaccggttccattgagaacaccggtcttatcgaggttccaatgggaacaagcctccgtcatatcatttatgacatcggtggtggtcttaagagtggtgctgcatttaagggtgtacagatcggtggtccttccggtggatgtctgatcgacgatcagatcgatcatccgcttgattttgattctgttaagaagctggatgccatcatgggttccggtggacttgttgttatggatgagaatacctgtatggtagaggttgcgcgtttcttcatgagctttacacagcgtgagagctgtggtaaatgtgttccctgccgtgagggtaccaaacgtatgcttgagatcctggagagaatcgtcgcaggtaagggtgagctttccgatctggatgagctggaagagcttgcaaacatggttcagagcatggccctgtgcggactcggtaagagtgcaccgcttccggtcatcagtactctgaagcgtttccgtgacgaatatgtagagcatatcgtagataaaaaatgtcgtgcgaaggtctgcacggcgctccgtcaattccatatcaatcctgagttctgtatcggctgcggcaagtgtgcaaagaactgtccgactggtgcgatttcaggaaagatcaagcatccacatgtaatcaacaatgacgtatgtatcaaatgcggatcctgtaaggataactgtaactttgatgcgatttatgtggaagcatagaagggaggatatcttatgggtacaatgacaattgacggaagaaaagtagaatttactgacgaaaaaaatgtcctgacagtcatcaggaatgccggtatcaatatccccacactgtgctatcattcagaggtttccacctttggtgcctgtcgtctctgtacagttgaggatgacagaggcaaaacatttgcctcctgttccgagcagccgagagacggaatggttatctataccaactccggtcgtattaagaaatatcgtaaactgatcgtggagctgcttcttgcagcacattgccgtgactgtacaacctgtgtaaagagcggcgaatgtatcctgcaggagctggcacatcgccttggcgtgcgggatatccgttttgaaaatacaagagaacagcacgagatcgatgacagttcaccgtccatcatccgtgatccgaacaaatgtatcctctgcggcaactgtgtacgtgcctgcgaggaacttcagggaatcggagctcttggattcgcattccgtggaacagaggccatggttatgcctgcattcaataaaaagattgctgagacacagtgtgtaaactgtggtcagtgccgtgtttactgtccgacaggagccatctccattcgtacacatatggatgaggtttgggatgcacttgcggacaaggatacccgtgtggttgcccagatcgcgccggcagtccgtgtagcagttggtgatcactacggcctcacaaagggcaggagcgttatgggcaagatcgtcaacgcactccacagaatgggctttgatgaagtatacgataccacattcagtgccgatcttactattatggaagagaccaaggagttcttaaacagagtagagaagggtgagaaccttccgcttctgacctcctgctgtcctgcatgggtgaagttcatcacagatcagtataaggaatatgttccgaacatttctacctgccgttccccacagggaatgatgtctgcggttatcaaggaatacttccgtgatccggagcatgcagcaggcaagaagaccgttatggtttccattatgccatgtacagccaagaaggcagaggcaatccgccccaacagctttaccgatggcgagcaggataccgatatcgttatcacaaccacagagcttctccgcatgatcgataactttggtcttgattttgcaacactggatccggaagcatgcgatatgccgtttggatttggttccggcggtggcgttatcttcggtgttaccggtggtgttaccgaggcagttcttcgaagactgagcccggatcacagcaaggaagccatgcatgagattgcagagtgcggtgttcgtggtgaagagggaatcaaggaatttaccgtaccgtacaagggaatggatatcaatgtatgcgtagccagtggccttgcaaatgcaagaaccgttatggaacgtgtaaagaacggcgaggcaaactatcatctgatcgaggttatggcatgccgccgtggatgtatcatgggtggaggtcagccgaccagatccggtgacagaaccaaggcagccagagcaagaggtttgtacaatgcagacaataccatgatcatcaagaaatccgatgagaacccactggttctggagctttatgagggactcctcaaaggcaaagagcatcatctgcttcacaatgagttctatatcaaagactgatatgaggaatacaaagggctgctgttcccggtgaacagcagcatataagaagccttccgggcatatactgtggtatgcgggaactgtcttttttaagacgtttcccggaacttacaggccagtatatgcagggaggcttttttatatggaaaactttcaggtttaccgtgatatccaggcgcggacgggcggggatatctacataggggttgtgggaccggtccgtacaggaaaatccacattcatccggagatttatggagctgatagcactgccatcgatcagcgagggaaaaagagcagaacttcaggatgaactgccattaagcggtgccggaaaaatgatcaccaccgtagaacccaaatttattccaaaagaagcagtggaagtatccataggggaaaaccagaaaatccgggtaaaactcattgactgtgtaggctttctggtaaaagatgcatccggaaatgtggaagaaggcagggagcggatggtcaaaactccctggcaggaaaaagcaatcccgttccatgatgcagcccgcattggaacggaaaaagtgatcagccagcattccaccattgggattgtagtcacaacagacggaagtttcggggagattcccagagaaaattttatcccggcagaggaacagaccataaaagaactgaaagtccagggaaaaccctttctgatcctggtaaactcccagactccctacagtgaggaaaccggaaaaactgtaaaacatctggaagagaaatttggagtatccgttctggcagtcaactgtgaacagcttcgaaaagaggatgtgaccagaatcctggagaagatcctttatgaattcccggtcagtgagatagagctttttgttcccagatgggtggagatgctttctccggaacatgaggtaaaggcggctctgttaaatgagattcgggaaaagatgaccagacttactcatgtgcgtgatgtaagcagagaatcagtatatctggaaagtccatatgtggaagatacattgcttgagcaggtcagtctttccgatggaaaagtccgtatccggatcgcagtaaaagacatttattattatcagatgctcagtgaaatgagcgggatatccatggaaagcgaatatgaactgatccagaccataaaagagcttgccggtatgaaggaacaatttgtaaaagtccaggctgccctggaagcggtaaaaggaacagggtatggggttgtggtgcctgagctttccgagatcactattgaggaaccagaggtgatccgtcagggaaataaattcggagtaaagatccggtcaaaaagtccgtccattcatatgatccgggcgggaatcgaaacggagatcgctccgatcgttggtacagaacagcaggcggaggacctgataaagtatatcagagaaagcccggagcgaggggaaagtatctgggagaccaatattttcggaaaatccatccagcagctggtggaagacggaatccggaacaagctggccatgatcagcgaagaaagtcaggtgaagcttcaggatactatgaagaagatcgtaaatgacagcaaaggcggactggtgtgtatcatcatatgaatggagaatagaattgcaaagcaaaaaggacgttcttcagcagacgtcctttttttgatgttgttttttccattctgcgataaactgaagctgttcctggtcagatagttcctgggaagcggcgtcatttcctgcagcggcacagcagaaaagaacaaagatctggagtccgaagaatacaagaaaaaagagaagcatagaaaaacctcctttatttttcagatatgttaagtattggaggagataatgtattttatacattatattgcaagaaaatcagagcaatgctataattatcaccgggtatgaagatttttaaaacaggaggaaaagaaaccatgaaaaagagaagattcgcacagcttgttcttatgatcacaatgctgttttgcctgacatttggcacagtgtgtgcgcaggcggcaacaacagcaaccacaacaaccgcaaaagcagctgttaaaaatggctggaaaaaagagggcggtcagtattattactacatcaaaggtaaaaaagttaccaacaaattaaaaaagatcaatggtgcgatatattatttaggctcgaatggtgcaagaaagaccggatggtatacagtaaaatccggaaatacctacaaaaccatgcagtttgcttccaacggaaaatacactgggaaatccaaaaaagcaaatgtagaactgatcaagatgacagattcagtgcttcgcagccagaagatttctgcaagtctgactacaactgcgcagaaaaaaacggctcttcagaaattgtttaactattccaaaaaatacggatatatgagaatgaagggctttgacggaaaacctttgcagtttacaaaaggtaaaagccagatgtttgcatatctgaccatgggaatggaaaaaggaaactgctacggtgttgcatcagcctttgcagtacaggctaaacgtgcaacaggacttccggtccgtgtatgctggggaaaaagtaatgtatttaataaaaataaatggcagccacatggatggacagagatcaagatcggaaatacctggtatacatttgatgcaaatgcagcaggaaacaaatccagaaaagatgttaaatattatatgcagaaatcttcatccatgaaaaaatactataaaactgaaggaagagaagatatcgttctctaaagaacaggagcagatcatgaaaaagtggacaaagaagatcctggcagcagtactttgtctgatgatgctccagatgccggcagctgaaccgcttattgcggttcagactgtacaggcagcatctacagccaaggcagccaaggtaaaaaacggtctcaaaaaagagggcggacaatactactattatgtgaagggaaaaaaagtaaagaatacatggaaaaccgtgactgtcgctaataagactaccggcaaaaaaatgacatacagatactatttttccaacaccggaaaggcttataaaggtggaacattcttcggggagaactatctccttgtaaaaaagatcggcgggaaatactatggatttaaccggtatgcacagatggtaaaaggcgtttattattccgcatatggacagtccagagccggattttatgcttttaatacaaaaaccggtgtatacgatgccagaacatcttcaagattaaggaaagcatttgtaagagaaaagagttctgcagcactgcggaaagcccttggcagacctcttcgtaccagaaagacagatggctgttatggtgacggacaggaatatctgttggaatacacaagattctgggtcaatacatacaaagacaaaaaagggaaggaaatcgtactggacgtgatcagcaaataagattcgccagaccgataaataaatataattatggttttcagttcaatggtatttctgtgtgtatttcttccggctgctttttgtctgcatctccttttacctgggatgcgggccaaaaattttttgcttgtagtggcaagtctggtcttttatgcatacggagaaccgatttatgtaatattactggttgcttcatcggcgggcaactatattttagcgcgcctgacaggggaatgtccgaagatccgtaagctcacaatgacattggctgtggtgataaatctcggtcttcttgtgatctttaaatattccggatttctggtggatacatttaattctgttaccggtgccggaattccggttccgcaggtccggatgccgatcggaatatcgttttttacttttcaggcactttcctacgtgatcgatgtttatcggggagatgcttcggttcagaagaatttcggaaaggtgcttctgtatatctcatttttcccacagctgatcgcgggacctatcgtcaagtatcatgatgtggaggcggagatcaataatcgtaagcagacgccggaggaaatcggaaaaggaatccggcgtttcattgcaggtttgagcaaaaaggttcttatcgccaatacaatgggacttgtggcggataatctctttggtgcggcagcaaccggaatcaccggtccgggtgcttggctgggcgcagtttcctatatgctgcagatctattttgatttcagcggctacagtgatatggcgctgggactcggaatgatgtttggatttcatttccatgagaattttgattatccttatatttctgccagtatccgtgaattctggagaagatggcatatgtctctttcaggatggtttaaggaatatctgtatattccgttagggggaaaccgcagagggaaattccgtacagtggtcaataaaatgatcgtttttgtgtgtacaggtatctggcatggtgcctcctttaattttctgttctggggaatttatcatggctttttcctgatgctggaagagtatatcccatttatcgggaaaaagggcggaaaactcaagagcttttttcagcatgtctatgcacttctgatagtttgtgttggctttgtgtttttccgtgcggacactatgaagcagggatgcttctggatcagagaaatgtttacggattttggatggaaggcttccgcaatgagccttacactgcagcagctgacaccggtatatcttgtaacgctggcagcggcactggtcgcagcagttccggtaaacagcatgctgaaaaagtataaatggtatgaaggctttacctatgtattaagtctggctggttttgcgctttgtgtattgagccttgccggcggaacctataatccgttcatctattttcgattttaagaggaggcagaaaacatgaaaaaattgcaggtgctttatattactgcattttttgcagcttgtcttgtgccatctctggggatggcggtgacaaagcaggaagcatcgtctgaaaaccgaagactggctgagtttcctgaactgaaaaaagaaaacgagatcaatacccgttggctgccggaagcaggcgaatattttcaggaacattttgcgtttcgaaatgagctggtaacggcaaatgcccttttgaacgggaagattttcggagtatctactgcagatggtgtgatccagggaaccgataactggctttattataaggattcgctggaggattatcttggagaggagcttctttccgagagaagcctttttaatattgcacatacattggccatgatgcaggagacattgaatgaaaaaggtgtgcagtttctttttactgtggcacctaataaaaactcactctatggagagaacatgccgtactatgacagcctgaaggtatcatcggacaaaaaccttgttaatcttcagaaatatctcaggcaggagcaggtttcttacggagatctgtatgagactctttcagaagagaaagaagttctttatcacaaaagagattcacactggaacaacaagggtgctgcagttgcggcggaaacattgctgtcttctctgaaaaaggagcatgtttcctataaggaggaaccctatactataaaaacagatttcacaggagatctggatgagatgctgtatcctcttgcaacgacaccggaagaggaagtttattatgacagacagacaacatttgcctatgtgggagaagtggtaagtaattttgatccgaagatcacaacggtaaatcctgtgaaggaaggaagtctggtcatgttccgtgattcttttggtaatgcactgcttccgtttatggcagatgcttattccagtgcgtatttttccagaggagtaccttaccagatgagtgaagtggatgagaagaatgcagatactgtgatcgtggaacgggcagagcgttttctcccggaaatggcacagtcaccgccgatcatggaaggaccggagtgtcaggtgaacgttacggaagaagatacggttcctgccggtgccggagcagttcagtgcgagatccagggaaatctggaaaagatcacaggttgtattgaagaaaaatatctggatatagacagcaggatttatataagattgaaccatgataagatttatgaagcatttccgatggatgtttccacagaagatggaaaaacggacagcagcggtttttgcttatatctggaccgttcacttcttgcagcagacggaaatcagatcgaaattcttacaggcaacaaagattcagcccgtataataggcggactgacactataaaggaggatataagaaatgagaaaaaaaacagtacaggtgcttttaggggcagcattgatcgcagcgatgtgtctgggggcaccgacagctgcttttgcagacgagacaacgacaaaggaggaaaccgcagagaaaactggcgataaagattccgcagaagaaaaagagaccgcagaggattttcagatcggagagcttacagtaaaaaatcagagcggacttgaggtgaaatccgcagagcttcaggatgcaaaagaggatgacagcaaaaagaaagactccaaggatgcggcaggtcaggatctagtgatcaccatgaaagatggtacagagcataccttccggaatgtgacaccggatgactggaaagaacctgttttttataatgagtatgagatcctttatatttcctatacagatgaaaaaggaaaatctcaggaagcgctggaagatgcgaaggagactgagctggaagaagctgccactacctatgcaaaatccaatgtaaatatccgtgaaaaagcggatacaaaatcaaaatccctgaaagtaacatctcttggaaccgagttcaaggtaaccggtgtatgccctggatggctgaaggttgaaggagatggtgttaagggatatgcggcacatacatacttcacttccaataaagatgagatcgacaagctggtagcagagcagaaagcagctgaagagaaaaaagtggcagaggcaaaagcggcatcagaggcacaggcagcagcagacgcgcaggcagcggcagacgcgcaggcagcagcggacgcacaggcagcggcagacgcacaagcagcggcagacgcacaggcagcggcagaggcacaggcagcagcagaggcacaggcagcagcagaggcagcagcatcagaacctaccgaagttagccgtcaggcctatgatgactgtgacggaagtggtcatggctactatgagatcacctattctgacggaagtgtgagatacgaagagtattgatcagaatgaacgataaggaaagatacgtatgaaaagattaaaattgttttttatggcgatggtcatgctttttgcggtgcagatctgcacggtttccgtaacctgtgagacgcaggcagcaactactacggcaactgtaaagaagaaaaccggtctctacagagaaaaaggaaaatattactactacaccaagggcagaaagatcagaaaccaatggaagaccgtaaagggaaaacggtattatttcgggcctaaatattatgcgttaacttaccataacaagatcggttccaggatctatgtgtttgatactgcaggacgccttttgaacggaaagacgtcacgtatcgtaaatgtaggaaaatattcctattacgtaaataaatatggaaatccttcaaagggttggctgtgccttccggatagaaatctttactatgcggattcctggggacgtttttacaaaaaccgtactctggagggaatccggtttaacggaaaggggcaggctgtaaaaaatgatatgcgcagtctgaagctgcattgtataggcgtggtccaaaatattacaagaagtggaatgtccaaaagccagaagctacaggcgtgctggagttatgtgataaataatacctattattcatctgcctattatccgaatttaaatcagaatgactggtggagaatgactgcgtggagaacgcttgctacaggaaagggaaactgttatggctatgcctgtgcatttgccgcactggcaagagagatcggatatgatccctatgtggtatgcggtcgtgttccgggaaccagagatggagccggggatggctttacaagacatagctgggtgatcataaacggacttcattatgacccggaaggacaggctaagggctggcataccggtgtttatggaagctacagctacggaatggataatcagatccagaaaacagttaatttccgtacaggaagaggaaactaaataaaatatacagcaaagatcccggggattcagatgtaagatcccggggtctttttatataaaacgagtagcgggaaagatgtccgcagaataagctaaagaaaggtcagatgtccggcgggagagctttggaaaggtataaaaggatgtatacaggaaaagggataggcgtggcggttctggataccggtatttttcctcatatagattttggcagccgtatttccgtgtttcgtgattttacaggagtcagacgcagcccatatgatgataacggacatgggactcatgtcagcgggatccttgcaggggacggaactgcatcaggtggaaaatataaaggggctgcacctggctgcagtatcgctgctctgaaggttctggatcgtttcgggaacggaagcagggaggatgtgatgcgggcatttcggtggatcatggagtttggaagcatttatcatatccgtatcgttaatatttcagtgggaacaacatcccgggatcataaggaacagacagatcttcttgaaggagtggaaaaactttgggatctgggatttgtggtggtagctgcagcaggaaatcagggaccgggggccggcacggtaacagcaccgggaagcagccggaaaatcattaccgtaggctccagtgatatgctgaatggcagaaaggcagtttccggaagaggccctacttttgactgtgtgtgcaaaccggatctggtagcgccgggaagccaggtcattgcctgtgcaccgggactgccgtactcatatgggctcaaaagcggaacctccatgtcgacgcctctggtgtcaggagggatcgcctgccttctggaaaaagatccccggctttctaatgtagaggtaaagatgttgttaagagaaaatgcagaagatatgggacttcccagaaatcagcagggatggggaaaatttaactgtgaaaaactgttggcaggctgaattattatacaattcttataaacatagtgtggtaaagcacaaaagcgttgacggaaccggaaaatatgagtacaatgtacagtaaaagtgctgaagaaagattctaaaggaaagagcacctggaatccgaacaggagaataaacctcaaaaggagaaaataatatggaaaaaatcaaaatgcagacacctttagttgagatggacggagacgagatgacacgtatcctgtggcagatcatcaaggatgaacttctcacaccgtatctggaactgaatacagaatattatgatcttggtcttgagcacagaaatgagacagatgatcaggttaccattgatgcagcagaagcaaccaagaaatacggagtagccgtaaaatgtgccacgatcacgccaaacgcagccagaatggaagagtatgacctgaaaaaaatgtacaagagtccaaacggaacgatccgtgctattcttgatggaactgtattccgtgcgccgatcgttgtaaagggaatcgagccatgtgtaaagaattgggtgaaaccgatcacacttgcacgtcatgcatatggagatatctacaagaatacagaattttatattgacaagccgggcgatgcatatcttgtatttgagggcgaagacggagaagagcgtaaggagctgatccagcattttgatggagcaggtgttctccgtggcatgcataatcttgatgattccgtaaagagctttgcgagaagctgctttaattatgcactggacacaaagcaggatgtatggttcggaagcaaggataccatttccaaaacatacgatggaagatttaaagagattttccagcagatctttgatgtagagtttaaggataaatttgaggaagccggcctgacctatttctacagtctgatcgatgatatcgtagcccgtgttatgaaggcagatggcggttttatctgggcatgcaagaactatgacggagatgttatgagcgacatggtatcttccgcatttggctctcttgccatgatgacctctgtactggtatccccgaagggatattttgagtatgaggctgcccacggaacagttcagagacactattatcgtcatcttgagggaaaagaaacatccacaaactccgttgcaacgatctttgcatggacaggagctctccgcaagagaggcgagctggacggaaatgaagcacttgctgattttgcaggaaaactggaaaaagcaacactggataccattgaaagcggaaagatgaccaaggatcttgcactgatcacttccctgaaagaggtacaggtattgaacagcaaagagtttatccttgctgtaaagacaaaactggatgaactgatggcataaataacaggaatttcagaacttcaagtaatttcataaaaaataaaaaactgcaccggaagatcctgggatggatcacggtgcagtttttttatgagggatatatatggatcatctgatctctgtcagaccgaaacgttcatggcctgctgtacatgttccacaaggatctgcctgacctggggatattctccaagtcccttcagtacaggggtgacttcatatccttcggaagaaagacggttcatccaggagtccggatctgcaccggccagatcgttctgtgcatggtcgccggctacgatcatgaagggcgccagcacgatctttttcggatgaaagctgtcggcagcccggagaagggagtccagggccggataggcttctacagttccaagaaaaatatttttatgtccggtatctttaaaacggtaatccaaagcagcataaaccgtgtttgcgtagtgttctgttccatgtcccatcagtacaagtgcagtgtccggatccatgtcccggaattcatctgcaactacccggacgatcgcctggttatcttcttctgttgtgagaagaggatttccgaaaacaatactggaaaaacggtcacgaaaagaaagcgcatcagctttcatctgatcattttcgataccgttgatcacatgagtcggctgtacgatcacatcggtgataccatccagaagcatctgttccagagcctcctttaccgtgtggatcgtaagaccgtcccgctttttcagtttggcaatgatcattttgcttgtccatgcacggtaggtgggacaggccgggaatgcatcggcaatatcgtgctcgatggcctcgatggtaagcttacgggtgttttcatagcttgtgccgaaacttactactaggatcgctttttttgaagctgagttcatacggggatttcctccatcctgataattatggtgattatgataaactctttatatttctccgctggaatataaagatgatccgcaatttctaccatatgatattataaaagggagggctgacattgtcaatcgtagttgactttccttacggaaatgtttatcataataaaagattgtggaaacaaaggagaaacgtaggacatgagtatattcatgattggaatcgatcataatatggcacctgtagatgtcagagcgcagtttgcttttacccgtaaaaataccggagaggcgttgcgcaggctgaaagaagaagctgggatctgcgggtgtattattctgtcgacctgtaaccggctggaactgtgggtaagtactgcagatgaggagaagccggacctgtatcagtggctctgctcgttgaaaggtgtgcagggagaacaataccagaagtattttaccagcagagaaaacgaagaggcagtggagcaccttttttatcttaccagcggactgaaatcccagatcctgggggaagatcagatcctgacccaggtaaaagaggcgttgagtatgtcaagggatgagtttaccacagacagtgttctggaggtgcttttccgtatggcggtaactgcaggcaagaagatcaaaacggaagtgccgttttctcatggaaatccttctgtgatccatcaggccatccgttttctggaagagggcggttatcatgttcgcaataaagtctgtatggtgatcggaaacggtgagatggggaagatggctgcccagacactgcgtgaagcaggagcggatgtgacggttacgatccgtcagtacagaagtggtgttgtgagcattcctgttggatgcagcaggatcaattatggtgagagaatggattatctgccggagtgtgacctggtggtcagcgcaacagcaagccccaattatacactgacggaagaattgtttgaggatgtacgtgtggaacgacctatgatccttatcgatctggcagttccaagagatattgatccggagatccgaaaaaaagataacatcacactttatgatatggacagcttccgaaccggcgagacaccgaaggaacttgcagataacctagaagcagcaggagccattgtgaaggcccagatgaacgaatttttccagtggctggaaggtcgtgatatcatcccgcgcatccaggagatcaaagcggatgctgtggaagatctgaacctgaggatcgaaaaaatcttccggaaaactcctatggaggattcagacagagaaaacctgaaaaaagcagtggatactgcagccggaaaggttgtgaacaagctgatcttcgggcttcgggacagtctgaaccaggatgcttttctggaatgtgtggaaggactggagaaactttatgaagaataaaccttatttccccatgtttatagacctgtccgataaaaatatcgttgtggcaggtggtggtaatattgctaccagaagaataaaaactcttctgaaatttacaagaaatatcacggtagtggctacaaaagtgacccaggagcttatggatctcgggaaagcaggaaccgtgactctgtatatccgtcccgtgaaacgttctgattttgccaatgcatatatggtgatcgcagccaccaatgactggaagctgaatgatgagatccaccgtgtctgtaaggaggagggcatttatgttaatgtagcctccgaccgggaagcctgtgatttttatttcccaggcgtatatatgcgggatgaaatggtagttggagttacagccagcggactggatcacaaaaaagcaaagcgtgtaagggaagagatccagaatgcgctggaaaaagtattgggagagcaggatgaagatgaagagagataagatcgtgatcggcagcagagagagtaagcttgcagtgctgcagagcgaaatggtccgtgactacataaaagaaaaaaatccggatctggaagtggaaatcctcactatgaaaactaccggggatatcattctggaccgtacactggataaggttggcggaaaagggctttttgtaaaggagctggataaagcactgatagatggaagaagtattctttctgtacacagcctgaaagatatgcctatggaggttccggaggagctgccgcttctggctttttccaaaagagaagatccgagagacgtactggttcttcctgagggagcttctgaacttgataaaagcaagccccttggatgctccagcttaaggagaaccttacagcttaaaaaactgtatccggatatggatgtcagaagtatccgcggaaatcttcagacaagactccggaagctggatgaaggacagtacagtgcattgatcctggctgctgccggccttaagagacttggactggaatccaggatcaaccggtattttacagcagatgagatcattccggctgctggtcagggaatccttgctgtacagggaagaaaaggggaagcttatgatttcttggagggctactgtgataaggatgcctggaccgcgggaagtgcggagcgtgcttttgtaaagctcctggatggaggatgctcttctccggtggctgcccatgcggaaattctcggggatgagatctatctcagagggctttattataatgaaaaagacggttcctatgtaacaggaacactgcgtggcaataaggcagatgcggaaagcttaggcagggaactggcagaaactcttcggaaaaaaggagaaaacagatgaaaacaggaaaagtatggctggtaggagcgggtcctggcgatatcggcctttttacattaaaaggcctcaaagtgctggaacaggcagatgtggtcgtctatgacagtctggtaggtcagggagttctgtcaagaatcccggaaaatgctaggctgatcaatgtaggcaaacgtgccagtcaccatatcatgcgtcaggaaaatatcaatcaggtacttcttgaggaggcacagcggggtcttcgtgtggtgcgcctgaaaggcggagatccattcctctttggaagaggaggagaggagctggagcttcttcgggagaatgggatcccttatgaggttgttccgggtgttacttcctccattgcagtaccggcatataacggggttccggtaacacacagggatttctgttcttcagtccacatcattacaggacacaagaaagccggagaagaatatgatatagacttccgggcacttgttgatacaaagggaacgcttgtatttctgatgggcgtgtccgcacttccggatatctgcgagggtctgataggcgcaggaatggaaaaggacatgcctgcggcgatcctgcagaagggaactacagcaggtcagaaacggatcgtagcaacagtttctaccctggaagaagaggtgaaacgccaggggatcgagacaccggcgatcattgtggtgggtaaggtatgtacactggcagagaagtttggctggtatgaagaactgccgctttcaggatggaaggtccttgtcacaagaccgaaggagcttgtttccagaactgcggacatgcttcgtgaaaaaggcgcggaggttctggagcttccggcgatccgtactgtccccatggaagaccagagccgtctctataaagcgctggatcacctggaggaatatcagtggcttgtatttaccagccctacaggggtaagggtattttttgaagaactgatccgccatggaaaagatatccgtgccatgggaaatgcccgtctggccgtgatcggggaaggaacaaaaaaggccctgaaggaaagaggtctgctggcagattttgtgccgtcggtatatgacggggatattcttggaaaggaactttcagagcttctttccggtggagaaaagatacttatcccgcgggcagaaaagggtaatgaaaagctcaccgcatttcttgcacaggcaggcgctgtggtcgaggatgttccgacttatcagactctttacgaaaagagccagctcatcgatgagaagaaggaatttgaaacaggacagatcagctgtgcggtgtttacaagtgcctccactgtgaagggatttgtagagggaacaaaaggactggattattcaaaggttaaggcggcctgcatcggcagacagacgaaggcggctgctgagagctttggaatgaaagcatatatgtcagaaaaagccaccattgacagtcttgtcaagctggtggaggatatgaaaaggagcgaatgatcatggaactgacaaaaagaccaagaagattaagaggtagcgaaaaccttcgtaagatggtacgtgagacaagaatggataaatcttctcttatgtatcctatgttcgtaatggaaggagaaaataaggaagaagaaattccgtccatgaccgggcagtaccgttacagcctggaccgtcttccgtataaactggaacagctttccaaagccggtgtaggcagtgtgatgttttttggtattcctgaccataaggatgaagtgggcagcggtgcctatgatccggaggggatcgttcagagagctcttcgcattgcaaaagagaaatttccggagctttattatgtaacagatgtatgtatgtgtgagtacacttcccatggccattgcggcgttctctgcggtcatgatgtggacaatgacaagacgctagagcttcttgcaaaaacagcactttcccacgtggaggcaggtgcagatatggttgctccgtctgatatgatggatggtcgtgttgcagcaatccgtcagtgtctggacaaggccggacattatacaacaccgatcatgtcctatgcagtaaaatatgcttctgcattttatggcccgttccgtgaggcagcagattctgctccgtcttttggggatagaaaaagctaccagatggatcctcacaacagcagagaagggctgaaagaggcacttgcagatgtggaagagggtgcagatatcatcatggtaaaaccggctcttgcataccaggacatgatctggcaggtaaaggagatcacaaacgttccggttgccgcatacagtgtcagtggtgagtatgcaatggtaaaagcagcagctgcaaacggctggatcgacgaagaaaggatcgtgggtgagatggctacaggagcattccgttccggcgcgcagatctatcttacctattatgcggagcttctggcgagacttatggatgaagggaggatcggctgatgacaagatcagaacagttatttgagcgtgcggtaaaaagaatcccgggaggcgtaaacagcccggtaagatcttacggagccatcggtgaggcacctcgttttattgaaaaagcagataaatgctacatctatgatgtagatggaaaccgttatgtggattacattgattcctggggcccgatgatcctgggacataatttcccggagatccgcgagagtgtgatcaaggcctgcgaaaatggcctgagctttggctgtgctacaggaatcgaagtagagatcgcagaatttatctgtgaacatattccacatgtagatatgatccgtatggtaaactcaggaacagaagctgttatgagtgccatccgtgcagcaagaggttttaccggaaaagacaagatcatcaaatttgcaggttgctatcacggacacagtgactgccttctggtaagtgccggctccggtgtcatggcaagtggtattccggacagcgccggtgttccgaagggctgtacacaggataccatgacggctacctacaatgatgccgccagtgtggaagcacttctcaaacaggaagagggaaatgtggcagccgtgatcgtggaggcagtaggagcaaacatgggtgtggttcctccgaaaccaggcttcttaaagcggcttcgtgagctttgcgatgagcacaattgtctgctgatctttgatgaagtgatcacaggcttccgacttgcctttggcggagcagcagagtattttggtatccgtccggatcttgtcacctacgggaaaataatcggcgcaggaatgccggtaggcgcttatggcggacgtaaggagatcatggatctgatctcaccgtgtggtcctgtataccaggcaggtaccttaagcggaaacccggttgccatggctgcaggtttcacacagctgaaatatctctatgagcatcaggaaatctacaaagatctggctgccaaaggtgagaagctttacggcggcttgaagaagatcgtggaggaaaaaggtcttccatatcaggtaaactatgattcttctctggcaagtattttctttacagaccaggaggtaaaagactatgtttctgcaaaaacatccaacctggagctttttgcaaaatatttcaagggaatgctgaaacgaggcattcatcttgcaccttctcagtttgaggcgatgttcctttccacagcgcatacagatgaagtaattgatgaaactctggaagcaatgagaggcgctttgggagatctgtaaagaggcgtaatggatgcgcaggagccgatccatttgcgtggatcatgtgtgaacgccatagtggacggcagctttgcataaaaaattgcacaaaagataacaggatggtaacttgttcttgcagaagctttgtgataaaataaacacaaaaatacgtaaccaatgtaaaaagcaggaggccagaacttatgggaaaaaagaagtacgtggcttacgtgggaacatatacccatggaaccagtaagggaattcaggtatacgatgtagatgtagaaaaaggaacactcacagaacgaagcgaagtggaagttagcaatgcttctcatctggcagtatcaaaaaacggtaaatatctgtattccattgaggatgagggtgtagctgtatttgaaagagacaagaacggtgatcttacccgcctcaacagtgtggatatcaacggaatgcgaggttgctatcttgcaacagatgtggacggaagatatctttatgtggcagggtaccatgatggtaaggtaacggttgtacatacacataaagacggccgtctgggaagtgttatggacggtgttttccacaagggacttggaagcgtggcagagcgtaacttccgtccgcatgttaattgtgtacgtccgacaccggataataagtatctctgtgcggtagataatggtatcgatcaggttaagatctatcgtatcaataagaagaaagacaaactggagctggttgacattcttcgctgcccgagagagagcggccctcgtatcatccgtttcagtgatgacggaagatttgcatatcttctttttgagctcagcaatgaggtgaaggtatacagctatgacggaagcggtaagaatccggaatttcagctgcttcagagcattaccactcttggaaaagaggattccaatgatgcgctccataacgcagcttccggtatgtctctttctgcggacggtaaatatcttttctgtacaacagcaggggaaaatactgtgactatgtatgcagtagaccaggaaacaggccttctgaccaagaaatttacacttccgatcagtggtgattacccgaaggatcttatgatcttcccggataacaagcatattgctgttgccaatcatgccagcaacagtattaccgttttcactgtggattatgaaaagaatatcatcatgatgaatgaaaaaccaagaaagatcgagacaccgaactgtatccatatctggccggtaccggatacatgggagcagttggattaagaacaggattgatcaaagtaagtcttgtacaggcagacaaaaacagactcagggacgagtaggaactttccctgagtctgtttttttgcgcatttataattttttatctgacaggtcaaaatgtgaaattaccgctgataaaattcgtggatacgatccatccgtgcactcatattgttaaaaagtgcatctgtaatggtaagtgctgccatagcttccacaacgactactgcacgcggtacgatcaccggatcatgccggcccttgatctcaagctccaggttttctccggtgttggtcacagtagactgagactgactgatggaaggagtaggtttgatatgtgcacggagaatgatatcgctgccatcactcataccgcccataataccacctgcgtggttggaagttttggaaataatgccgtctttttgtacaaaaccgtcgttgtcttcggaaccggtaagacgtgtcacgttgatgccgtcaccaatctcaacagcttttacagcaccaatggacatgatcgcatgagcgagggtagcatccagcttgtcaaaaaccgtatcgcccagaccggcaggaacgtttttgatgcggcattcgatcacaccgccggcactgtcctgactgttcagacattgttcgagataggcagatgcctttgcggctgcgtcggcatctggcatgcagagtgcattatttcggatctcttcttctgagaaggaccggatctctacaggaccgatggatcttgcgtaggtagtaaatgtaatgccaagttcgtttaacagcttgatggcaatggcaccggctgccacacgtccggcggtttctcttccggaggagcgtccacctccacggtaatcacggaatccgtatttctggtcaaaggtaaagtctgcgtgaccgggacgataggagtatgcgatatttccgtaatctctggaacgctgatctgtattgcggatcagaagagaaattggagtaccggtagtctttccttcaaaaactccggaaaggatttccaccagatctccttccttacgggcagttgtataacggctctgaccgggctttctccggtcaagaaaaacctggatatcttcttcgcagagagaaagacctgcgggacagccgtcgagaacggcaccgatagccttgccgtgagattctccccaggtggtaaccacgaatttttttccgaatgatgactgactcatttgtataacttcctttcgttggaattctggaatcattatataggaagccggaaaaaatgtaaagaacgtggaaggcagaatgaatttttatgtaaagatcatgtgaaattatttaaaagctcttttaaaaagaaaaggtatgaattgacaaagctattttgactatttataataaaaaagaattttgccctggcaaaagaaaagcaagagaagggaagtgggaatcgtggtaaggatttacaagacaatagacggagccatccaccagatacaggaaccggaggaaggctgctggattgcgctgacgaatccgacggcaacagagatttttgaattttccgagaagtttgatatagaggttgacgatttacgatcccctttggatgaggaagaacggtcacgtatcgaagttgaggataattatacactgatcctggttgatgttcctatgatcgaggaacgtaatgacaaggactggtatgggacaataccgcttggcatcattgtgacggggtctatgatctttaccatctgtctagaggacacaccggttcttaccagatttatggagggaagagtccggagcttttttacctatatgaagacccgttttatctttcagatcctttacagaaatgcgagcatgtacctgcgttatctgcgtatcattgacaaaaaaagtgagcaggtggaagaaaaactgcatctttccacaagaaatgaagagctgatcgagcttctggagctgcagaaatccctgacttattttatcacatcactccggtccaatgaggttgtgctggagaagcttctgaagatagacagcatcaagaaatatccggaggacaccgatcttctggaggatgtcatcactgagaataagcaggcaatcgaaatggccaatgtgtacagcggtatcctgaacggaactatggatgcttttgcatcgatcatctccaataatatgaatatcgttatgaaggtactggcgatcattaccattgtcatgagtattccgactattgtgttcagtgcttacggaatgaatgtggctggttccggtatgcccttatcaaggagcccattgggatttctgatcattatcctgatttctgtggcaatcagtgttgtggcagcgatcattctttccaagaagcgatttttctgattttcaaaagttttctgaaaggagattttaatgaaatttatcgacaaactggaacgtaaattcggaagattcggggttccgaatctgactgtttacatcatcggatgttatgtgttggggtattttctggctatgtttgctccgggagttttgaatatgctgagtcttgatatgtccatggtcatgaagggacagatctggagactggtgacatgggtgatctatccgccgtccagtgtgggaggaaccggcaatcttgtgatgttccttctcgcaatcttttttttctattatccgatcggtacttcactggaacgtacctggggaacttttcggtacacattgtatattttttcaggtgttttgtttactgtgatcgcagcagtgcttttacatgtatttacaggtggttatgtggtgatgaacgggatcgcctattctcttggcggaaatatttttaccacatattatatcagtctttctattttccttgcctatgcagtcacatatccggatcttcagctgcttcttatgtttgtgatcccgatcaggatgaaatggatggcctttgtatacggactgttcattgcgtgggatatcgtatcttatcttcgagtcgggctttgggtaggtgtagtaccgatcgtagcatcacttttaaactttgtgatcttttatttcagtacccgtgatatgaaccgatacaatccgaaggagatccacaggaggcagcagtttaagaaggctgtggctccttccagaacagggtccggtccggatgggatcgccaagcataaatgtgcgatctgcggacgtaccgaaaaggatgacccaaacctggagtttcgtttctgctcaaagtgcaacggaaattatgaatattgtcaggatcatttatttacacataaacacgtacagtaaaacgtaaaaagaaggagaataattgattatgaaaaaaactaagatcatttgtacacttggacctgccagcaataacagggaaactctgaaggctcttatggagaatggaatggatattgccagattcaacttttctcacggagaccacgaggagcagaagggccgtgtggatatgatcaaggagcttcgtgaggagcttgatatgcctattgccatgcttcttgatacaaagggaccggagatccgtactagacttttaaaggacggacagaaggttaagctggaagcgggaaaacagtttgtacttggaattggcgattttgaaggcgacagcacaaaggttgctatcacatatgagacactttacaaggatgtaaaaccgggaaacaggatcctcattgatgatggtctgatcgagttggaggttaaggcgatcaagggaaccgatattgtctgtgatatcttaaacggtggtgagctgggagagaagaagggtgtaaatgttccctatgtaaaagtaaatcttccgggaatcacagagcaggataagaaggatattatctttggtatcgagcagaaatttgatttcatcgcggcatcttttgttcgttccgcagaggtgatccgtgagatccgtaagcttctgaatgataatggtggaaaggatatcggtattatcgcgaagatcgagaatgcagagggtgttgagaatattgattccatcattgaagcatctgacggtatcatggttgccagaggagatctcggtgtggaaattcctgcaagccaggtacctcacatccagaaggcgatcatccgtaagtgtaatgaacattatacaccggttatcacagcaacacagatgcttgattccatgatccgtaatccgcgtcctacacgtgcagaggtagctgatgttgccaatgcgatctacgacggaaccgatgcgatcatgctttccggagagacagcagctggtaaatatccggttgatgctcttaagatgatggcagatatcgcagagatgacagagccgcatctggattataaagtgtttattgaacatcgttccatggatggaagagagaagatctccagtgcggtggcacttgcaacggtgcgtactgcaaagaacctgaaggcgaacgctatcgtaacaccgacaatgagtggaaatacagccagactgatctccaatttccgtccgaaggttccgatctatgcgatcacaccaaactcaaccatccagcataaacttcagctgatctggggtgtaacacctctgaaaggatatcagagagataccacggaccatatcatgtctcaggctatgaatgttgtccgcagccgtcatctgatacataaaggagaccttgttgtatttacagcaggagaccctgcgaccaacatgacaaacggtcgtggtgcagtgacaaatatgatgcacgtgatcgaggcagaataagactgagttttcttcgggaacagcagtcggaaaaacaggagatgcagttattatgaaaaaagaaccatttgtgacacttgagaaactcaacgaaattactgaaaagtttccgacacccttccatctctatgatgagaagggaatccgtgagaatgcaaaagccctgaaagaggcctttgcatggaacaaaggattcaaggaattttttgcggtaaaggcaacaccgaatccatatctgatcaatattctgcaggagtatggctgtggctgcgactgctcctcagaaacagagcttatgatggccaaggcagtaggttgcaaaaagggcgatatcatgttttcttccaatgacacaccggagaaagagttcagatatgcagatgagatcggtgggatcatcaaccttgatgacattacacatattgagagcgtagagaaagctctcggaaaaatcccggaagtgatcagctgccgttacaatccaggtggagtatttaagatcagtaacggtatcatggataatcccggagatgcaaaatacggaatgactaccgagcagatctttgacgcattccgtatcctgaaatccaaaggtgccaaagagttcggaatccatgcattccttgcaagcaacacagtgaccaatgattattatccaatgcttgcaaaggttatgtttgagcttgccgtgaagcttcagaaggagacaggtgcacacattaaattcatcaacctttccggtggtatcggaattccttataaaccggatcaggagccaaatgatatccgtgtgatcggtgagggtgtccgcaaggtttatgaagaagtacttgttccggaaggaatgggtgatgttgcgatctatacagagcttggccgtttcatgatgggaccgtatggctgccttgtcacaaaagcaatccatgagaagcatacacataaagagtatatcggcgtagatgcctgtgcagtaaatctgatgcgtccggctatgtatggtgcttatcatcacattacggttatgggtaaggagaaagagccgtgcgatcataaatatgatgtgacaggttccctctgtgagaataatgataaatttgccattgaccgtatgcttccgaaaatcgacaagggagatcttcttgtgatccatgatacaggtgctcatggttttgcaatgggttataactacaatggtaaactgaaatctgcagaaatccttcttcatgaggacggcagctttgagatgatccgtcgtgccgagacaccgagagattattttgcaacctttgactgcttccctgtttttgagaaacttcttcaggatgaagacgaattgaaataaaatagcggaaatatataaaaacagccttctgtgcatcttggtaatgatgccggaaggctgttttatgtttaagtgtctggtaggtataagatcgcgagcagggcggaaggtggtcaaatgcagggttacagcttccggctgccggagatttctgccagggcttttctaaactcaaagaaaaacaggatggcagtaaatgtaacggccaggatatccgcaaccggctcggccatataaactgcatttgtccggtcagcacggaaaatattgggcaggatatagatcagcgggatgaccagaataaatttccggacaatagccacaatgatggaatctttggctctgccaagggagataaaggtcatctggcaggcaatctggataccaaagataaacacaactgccatatagatccggagcgctgtttttgtgaaagcaagtaatgtactgtccgaagtaaacattccggcaaagatctgcgggaagatcataatgatcagccacaggatcacggaataagaaacacttgtttttataagaagcttaaatgtagaacgtacacgtttttcgttacgtgcaccatagttgtagctgatgataggctgtgcaccctgaccaagtccctgaagaggaagcatggcaaactgcatgacgctggtaaggatggtcatggctcctacggcaacatccccgccgtattttaagagtgaggaattgtagcagacagagataacgctttcactgagctgcatgacaaagagagaagagccaagagccatacagggcagaatgatatcggctttcagtttcatggtgcttttccgaagcttcaggaaggtcttttttccaaagaggaaggagaggacccagatgcaggaaaatgcttgggagatcaccgttgccagagcagcgccccggacacccatgtggaatccgaaaataaaaaccggatccagaataatgttggagatcgcaccgatcaatacggagagcattccggtttttgcgaatccctgggctgtgatgaaattattcatgccaagagtcagctgtacaaagatagttcctactgcatagatattcatgtaacccaccgcatagtcgatggtgtttgcactggcgccgaatgcaaggagaaggctgcggtttccgagaaacaggataacagtcaggatcagggagatgatgatctgcatggtgaagcagtttccgagagtctgttcggctttcgacgtgtcatttttacccataaagatgctggctctgggagcgcctccgtttccgacaagagcagcgaaggcagatacgaccataataagcggcatacatacacctacaccggtaagggcaagagcaccctctccgggaatatgaccaatatagatacgatcgacgatattgtagagcatattgatgagctgtgcggcaacggtaggaagtgcaagctgcagaagaagctttccgacagactcggttcctaaaaagcttttgtctttttccatttttttattcctttcgtgttttttgatagtatataataaagacctgacagatttctccgtcaggtcttttatgcgaatgccgctggccggactcgaaccggcacggatcgctccgcttgattttgagtcaagtgcgtctgccaattccgccacagcggcataaccatttattataatagcacagtatcaggtggcttgcaaggattttttcagaataaaggtattatttggaaatatttttaattctaaaaagtttatgaaatcggatgaggcatccttgaaattgactgaaaaaagtggtagagtgtactacaaggctgtaccacttgatatagcactgtggatatagcaatatactataagataacggaggagactgcatgaatctgaattcaaaaaaaccagagaagcggccgctgtatgtatattacattattgcggtcgtaattattgttttgctgaatgtttttgctcttcctgctctttctgagagaagtgtaaaagagaccgattacaccaccttcctgaaagctgtagacagaggaaaagtatatgaagcaactattaattctgattatatctattatacgatgaaggtagatggaaatgatgtctattgtaagacggtatctgtagaggatcaggatcttgtatcccatctttacgatgcgggcgtaagtatagagggtactgcaccgcagagacagtccctgcttttatctctgatcctgggatatgtactcccgatcgcaatctttattctcctgggacgctggctcagcaagaagatgatgagttccatgggaaacggaggaccgggaggaatgatgtcctttggcaaaagcaatgccaaggtttatgtgaaatcctctacgggaatcaaattttcagatgttgccggtgaggatgaagccaaggagcttttgacggaaattgtagatttccttcataatccggagaaatacagagagatcggtgcctccatgccgaagggtgcccttcttgtaggccctcccggaaccggtaaaactcttcttgccaaggcagttgccggtgaggcggaggttccgtttttctcaatttccggttcggaatttgtggagatgtttgtgggtatgggtgctgccaaggtccgtgatctttttaaacaggccaatgagaaggcaccatgtatcgtatttattgatgagatcgatacgatcggtaagaaacgtgacggctccggaatgggcggcggaaacgatgagcgtgagcagacactgaaccagcttttgacagagatggacggttttgacggttccaagggtgttgtgatcctggcagctaccaaccgaccggattcccttgaccctgcacttcttcgtccgggacgttttgacagaaggatcccggttgagcttccggatcttcaggggcgtgaggaaatcctgaaggttcatgccaagaagatcaaaattgcggatacagtccggtttgatgaaattgccaaggcggcagtcggtgcctccggtgcggagcttgctaatattgtcaacgaggcagctctccgtgcagtccgcgacggacggaaatttgccacacaggcggattttgaagaaagcatcgaagttgttattgccggatatcagaaaaagaaccgtgtactttccaataaggaaaagctgatcgtttcctatcatgaggttggtcatgcactggttgctgccaagcagacagattctgcaccggtccataagatcacgatcattccacgtacctccggtgcactgggatataccatgcaggtagatgagcaggaacatttcctgatgactaaggaagaactggagaataagatcgctacatttacaggcggccgtgcagcggaagagctgatcttccattccattactaccggtgcctccaatgatattgagcaggcgaccaagattgccagagcgatgatcagcaggtatggtatgagtgatgattttgacatggttgccatggaaaatgtaagcaatcagtatcttggcggagatgcaagtctaacctgttcctttgagacgcagacgcttttggataagaaggttgtggagcttgtaagacgggagcatgaaaaggctacgaagatcctgacggataatatcggaaagctccatgagattgccaagtatctgtatgagcatgagacgatcaccggtgaggagtttatgaagatcttgaatgaagcgccggtggagattgagaatacacaggaaaattaaatatgttggcgggagggacgccgaagggaatacttctgtatggtcttcggcttccgttgggcgttagttctaaggccctgaaaatctgctaaaaccattaaaaaaagttcggaactcgcggcttgttgccgctcagacagccgaactttttttaataacgcagatttccagaacctaagaactagcagccctcctccagagacagagccatacagaagtattccctccggctgtgctctggccatgtggattgcttctgactagtctttaccatatttccgggtgtaccttggaacaggtgagtgccagacttccggggccgatgtggcaggagacgctcagggagagagggaagatgttgacttcaccgatattcgggaaggtggtgaggacttctttccggaattcttcggctgcttccaggttgtgggagtggatgacatccaggttgatcttttctccaaagcggtctgcaatgtcatctttgatggctttagtcatagtgttttttgcctgggtcatggtgcgggccttggagaaggcgtccagcttttcgccctggatctgcagaaccggtttcagacggagcatggttccgatggctgcagctgcaggcgtgatgcggccgccctgtttcaggtacttcagagtagctacagtgatatagatgctggagtcgaagcgggtttcttccagccaggttccaatttcatcggcagagagaccgtttttagcctgctggatagcctcaatggcagagtaacgtaaggttccggagatcctctggttgtttacgacacgtacacgatcatcatagtcttctgcaagcatgcgggcagtctgcatggaactggagagaccgctggacatggggatatgtacgatttcgtcgtagtctttgagcagcttgtcccagagggtagtgacggattccggtgtgggctgggatgtggaaactctgcagcttggattttgttcaagatgctgaaagaactctgattggttcatgtcaatgtcttccagatattccttatcatctataaaaaacggcattggaagcatgtagatgccaaggtcttttacttgagcgggagacatgccgcagttactgtctgtaacgattgctatagatttcataatggtgatcctccttgcctggattttcatatttggtcagtttttctgttttctgaccgggatatctcaagtataccacaggaaaccgcccttgtcattcaacgtttaattcgctataatggtataacattctgggaaatatgtccccagtctggggcaaattgtgaagcgggatctcagaagaggcttatcatatgggaggatccgctgctttgaaagagagggaaaatatgaactgtcgtattgcagagggaatggttaataaatatatcgatcatacgttgccgttgaatgatctggagggttttctggagcatattgagaagtgttcctcctgctacgatgagcttgccacatatttcattgtacataaggccatgcagcagctggatgagaaacaggaagatactgttctggattttaaggagcttctggaagaggatatccgaaaatccagaaggtatatccgaaaaaagaaatttcacagagcgatcgctgcagtggcagtctgcgttctgatcgcggcactggtggtctttcttgtttttgtgatcctggaactgaaggagggaatttgattttgagtgaaaaaatattactgatcgatggtcacagcatcctgaaccgtgcgttttatggtctgccggatcttaccaatgcagaaggacgtcatacaggagcggtatatggatttctgaatattatgttcaggatcatggaggaagagaagccggagtatcttaccgttgcatttgatctgagtgcacctacgttccggcataagagatatgaagcctataaaggtacccgaaaacccatgccggaggagcttcgggaacaggttccgctgatcaaggagatgctttcagccatgggaatcaacatcatgtccctggaaggctatgaagcagatgatcttcttggtacggtcgccagaagaagtgaagcaaagggtatggatgttaccattctttccggagaccgtgatcttcttcagcttgccacagataaggtgctgatccggcttccgaagactgtccggggaaagacaaccattgaaaactaccatacagtggaagttcttgagaaatatcaggtaacgccgccgcagatcatagagctgaaagcgctgatgggcgacagctctgataatattccgggaatcccgggcgttggagagaaaaccgcgaccaagatggtcgtgcagttcggttccattgagaatgcttatgagcatctggaagaggtaaagcctaataaggcgaaagaatctctccgcgagcattatgatctggcacagctttccaaagagcttgcaaccatcaacacagatagtccgctggaattttcctacgaaaaagcgaaagtggaaaatccctatactccggaggcatatgaattgtgtaaacgcctggaatttaagaacatgctgaaccgttttgatccgactacgacagcagattcctccatggaactggaattttttacctgtaatgatctttccggtgtagaggcactgtttgaaaaagcagcgcagaaagatcaggtgggtatttctgttcttgcagatccggatcaggtgtataccgtgggattggtcctggatgaaaaagaaatctatcagattccggtaggaggacttctcacaggggattacctttgcggaaaactgaaaactctggcggacagtacggtgctctgtgctatggatattaaatcagttctcaaacatgtttcccttgatgatccgaagaaggtttttgatgcgggggttgctgcatatcttctgaacccgctgaaatcttcctattcccatgatgacatcgccagagaatatctggatggtatgatgctcccctcaaaggaagaccttcttggaaagacttctctgaaaaaggcctgggaagaggaacaggaatgccttggaaattatgcctgctatcaggcgtttgtgccctgcatggcccgaaaggttcttcttgaaaaactggatgaaacaggcatgcgtaaggtttatgatgagatcgagcttcctcttgtctttaccctggactccatggaaaaatgggggatttccgttaagggtgaagagcttaagagctatggtgaaaaacttaaagtccgtatccaggagctggaaaaaaccatctggcaggaagcaggggaggagtttaatatcaattccccgaaacagctgggtgtgatcctttttgaaaagctgggacttccaggtggaaagaagaccaagaccggctattccacagcggcggatatcctggataagctggcgccggatcatgccatcgtaaaagatatcctggagtaccgccagctgaccaagctgaaatccacttatgcagatggtctcggaaatgtgatcggagaagatggaaggatccactctacttttaatcagacgatcacagcaaccggtcgtatcagcagtacagatccgaatcttcaaaacataccggtccgcatggagctgggcaggctgatccgtaaggtttttgtgccggaagagggatttgtatttctagatgccgattattcccagatcgagcttcgtgtgctggcacatatgtccggtgatgaaaaactgatccaggcttatcgtgaggcggaggatatccaccggctcaccgcatcccaggtgtttcatgtgccgctggatgaagtgacatctcttcagcgaagaaatgccaaggcggtaaatttcggaatcgtttatgggatcagttcctttggactgagccaggatctgagtattaccagaaaagaggcatctgcctatattgagaaatatttcgagacctatccgaagatcaagggctttctggacggtctggtaaaggatggcaaggaacacggttatgtgacaactatgttcggcagacgaaggcccgtgccggagctgagatccagtaatttcatgcagcgctccttcggagaacgtgtagccatgaactctccgatccagggtactgcagcagatatcatcaaaatagccatgaaccatgtttatgaacgaatgaaaaaagagggactgcgttcaagactggtgctgcaggttcacgatgagcttctgatcgagacaaagaaagaagagatcgaggaagtttcccgtattctggaagaagagatgaagggagctgcagaccttgcagtggaacttgacgtagatatgcaccagggtgacagctggtatgaggcgaaataaatgagagtgatcggagtaaccggcggagtaggggccggaaaaagtacagtacttgaaatcctggaagaagatttccaggcatatgtgatccaggcagaccagcttggtcacattctgatggaaccgggggaagaatgttacgatgcggtgatcgcattgtttggaaaagaaatcataaaaaaagataaaactattgaccggagacggatttctgatgtagtattcacagataaggatatgcttttgaaattaaacgggatcatccatccggctgtaaagcagagaatcctagatcttcttggagaacagaaggaagccggaagagagatctgtgttgtggaagctgctctttttctggaagagaattatcaggaattctgtgatgaagtctggtatgtgtatacagaggaggaaatccggatccgtcgtctgatggaaagccgtggttattccagagagaaatctcttggcattatccgaaatcaggtatctgaccaggttttcagagaacatacggattatgtgatcgagaataatggagatctgaagggtacccggagacagatcagagaagggatagagagaaatgagactttgtagtattgccagcggaagcagcggcaactgtatttatgtgggatctgaggaggcacatgttctggtagatgtggggatcagcgggaagagtatcgaaaagggcctgaattccctggatcttaccggaaaagatgtggacggaatcctgatcacacatgaacattccgaccatatcaagggactgggagtgatctccagaaaatatggaattcccatctataccacaggtggaacagcagatgccatgcttcgtatgaaatcccttggaaaaatgccggagggactgatccacgagatccgggaggatgagccttttgagatcaaggacctgacggtaaatccttttaccattccccatgatgctgcacagccggtgggttaccgcctggaatgtggagagcattctgtgggcattgccacggaccttggaaaatataatgattacattgtaaaaaatctggagaatctggatgcggtgcttttggaagcaaatcatgacatccgcatgcttcaggttggaaaatacccttattatctcaaacagaggattctgggagaccgtgggcatctctccaatgagaatgcaggacgtctgctctgtcggatcctccatgataatctgaaggcggtttttctcggccatttaagcagagaaaacaactatgaagaacttgcctacgagactgtgtgctcggaggtgacacttggtgacaacccgtaccgttccagggattttaagatccaggtagcgaagagggatcacatatcagaaataatcacagtgtagaaaggaaaaaacgatgaagaagacaattatcacagtagtaggaaatgacacagtaggaattattgcaaaggtttgtacatatcttgcagagaatcaggttaatattctggatatttctcagaccatcgttcagggttacttcaacatgatgatgatcgcagacacagcaaaatgtgaaaaggatggcggtgaacttgcaaaagagcttgaaaatctgggcaaggagatcggtgttgtgatccactgccagcatgaagatatttttaacatgatgcatcgagtatgatcaagcagcgaatgcggattgccaatgcatatgatatctactttacatcaatcatcagggagaaaataaaatgatcaatatttttgaggtaaacgagacaaataaaatgatcgagcaggagaatctggatgtgcgtaccatcaccatggggatcagccttctggactgtatcgatcctgacctggatgcactgaatcagaaaatatacgaaaagatcaccacaaaggccagaaatctggtagctaccggtgatgagatcgcaaccgagtacggtatcccggttgtaaataaacgaatttccgtaacacccattgctctggttggcggggctgcatgtaagaaaccggaggattttgtgaccatcgcaagaacgctggataaatgtgccaaggaagttggcgttaactttatcggcggatattctgcactggtaagcaaaggaatgactccggcagaggagcttcttatccgctccattcctcaggcaatggcagaaacagagcgcgtctgcagttctgtaaacgttggttccaccaagaccggtatcaacatggatgccgtaaagctgatgggcgagatcatcctcgcaacagcagaggctactaaggaccaggattctcttggatgtgccaagctggtagtattctgtaacgcaccggatgataacccgtttatggcaggcgcgttccacggtgtcacagaggcggactgcatcatcaacgtaggtgtcagtggccctggcgttgtaaagaaagctctggagcaggttcgtggcgaggacttcggaactctctgcgagatgatcaaacgtaccgcattcaaagttacacgagttggacagctggttgcacgtgaggcatccaagcgtcttgacgtgccgtttggtattgtggatctttctcttgcaccgacaccggctatcggtgattccgtagctgagatcctggaagagatcggccttgagagagccggtgcacctggaacaactgcagcgcttgcacttctcaatgaccaggtgaagaaaggcggcgttatggcagcagctgctgtgggcggattaagtggtgcctttattcctgtcagcgaggatcagggaatgatcgatgcggtaaacgagggagcgcttactctggagaagctggaagccatgacctgtgtatgctctgttggtctggacatgatcgcagttccgggagataccaaggcgactacactggcaggtatcattgcagatgagtctgccatcggtatggtaaatcagaagacaactgcagtacgtctcatcccggttatcggtaagggtgtgggcgaaacggttgagttcggaggtcttcttggctatgctccgatcatgcctgtaaattccttctcctgtgatgcatttgtacagagaggtggaaggatcccggcaccgatccacagctttaagaattaattttatttttggacttgacagactcacgttgatgtgctaaagtaaacacaacttaaaaaacaaaccagtgagaaagagaagtaaacatttcaggaagcttcacagagagcggtgatggtggaaatccgcaggggaccagatgttgaatggactttcgagggcggcccgaactatttatctgtacagtaggcgccgacgggaaccgaacccgttaccaatgaggagtgtatgttagtacaccggaaagtggacgattcgtcaatttgagtggtaccgcgataataaagaacttttattaccgtctcaagcatgatataagcttgggacggtttttgtgttacaggaaaagcgattctgtcgcatgaaagttgttccggaaaagcagaccgcaaggtgtacaaaaggtaatcataagcggaaataagaagggagaacaaaaccatgaaaaaaagaatgttagtgatcgcagcagcagtagcagcaacaactatgatgatgacaagcccggttatggcggaagattttaaagtgggcatctgcaattatgtagatgatgcttccctgaaccagatcgtagacaacatccagtcccgtctggaggagcttggcaaagaaaagggtgtcacatttgatgtgtcttatgataactgtaatgcagatgccagtgttatggaacagatcatttcagattttcaggcggataaggttgacctgatggttggtgtggctacaccggtggcaatgcgtatgcagtccgctacagagggaagcgatacaccggttgttttctccgcagtatctgatccggttggctccggccttgtagattctctggatgctcctggtgcaaatatcacaggaaccagcgattacctggatacttcttctatcatgaagctgatccaggcacagaatccggatgtaaagaagatcggtcttctctatgatgtaggacaggattcctccacaacagcgatccaggaagcaaaagattatctggataaagagggaatcgaatatgtagagcgtaccggaaccactaccgatgaagtccagctcgcagcagatgcactgatcgctgacggtgtggatgccgtatttacacctacggacaacaccatcatgacagcagagctttctatttatgaaaaattcatcgacgcaggaatcccgcactacacaggtgccgactcctttgcattaaatggtgcctttgtaggatatggtgttgattatgcaaatctgggacagaaaacagccgatatgatcgctgacatcctgatagataatgcggatccgtctaagacagctgttgaaacctttgacaatggtactgcaacagttaatacagaaacctgcaaggcacttggacttgatttcgataccgtaaagaaggcatttgagcctctctgcacacaggtaaatgagatcacaactgcagaaagctttgatgaagtagaatcaaaataaattaaccgctcacttttgtgagcagttatgaaataaatccaattggaggaaatcactgtgacgattgcaactatgttctccctcggggagactgccctgaagcttggactgatctgttctctgacagttcttgctttgttccttagttattccatgctgaatgtctgcgacctttctacagatggctgctttaccttcggggccgctgtaggagccgtagttgctgtaagcggacatccgtttctgtccattgcggcagccatggcagcaggtgttacatcaggatttgtaacggctatcctgcagacgaagctgggagtagacagcctgcttgcaggtatcattgtaaatactgcattatattccgtaaatatcgcggtcatgggagggtcatccctgatcaatatgaatcggacgaccacagtatttaccatgatgaaggatgcgcttgcaggtacaccgttaaaaggcagggaagatatcctcattgcagccatcgcagtgatcctcgtgatcgtatttctggtattcttcctgaaaacaagacttggccttgcgatccgggcaaccggaaataattctgatatggtaaaatcttcctccatcaatccggtctttacaacggtgatcggcctttgcgtggcaaatgcatttaccgcactttccggatgtcttctgtctcagtcacagaaatccgtagatatcaacatcggtcagggtatggttaccatcgcactggcatccttgctgatcggaggtactcttctcggacatggaggaatttttgtgagagcggtgggaatggtgcttggttcctttatcttccgccttgtgtataccatcgcacttcggttcaatatgccggcatttatgctgaaactggtatcctctgtgatcgttgttcttgcaatttccggtccgtatcttaagaaacagtggccgcagatccgaagaagaatgactcatacaaaaggaggaagatgatccatgctaaaaatcagccatatttcaaaaacatttaatccgggaaccgtaaacgaaaaaaaggcgatcacagatctttccctggaactgaaaaaaggcgactttgctacgatcatcggttccaatggtgcaggaaaatcaacactttttaatgcgatctgcggtgattttcttacagatgccggttcgatcgagctggatggcagggatatcacatttatgccgcagcatgcacgcgcaaaagagatcggacgtctttatcaggatccgatgcgtggtactgcaccgggaatgacgatcgaagagaatcttgcacttgcagccggcaagggtgggtggctttcccgcacgacccggcaggaaaaagagcgttttcgtgaggaattaaagaagctggacattgggctggaagagcggatgagccatccggtaggtcttctttccggtggacagagacaggcgctgacgcttttgatggcaaccatgaatccgccgaaattacttcttctggacgagcatactgcagcccttgatccgggaactgctgagaaagtccttaatctcaccagacggatcgtggaagaaaatcagctgacctgtctgatgatcacacacaatatgcagtcagcaattgatcttggtaaccgtatcctgatgatggactccggcaatatcgtgttggatatcggaggggaagagaagaaggatatgaccgtggatggccttcttgagaaatttaaaacgggagtgggcaaggctttggataatgaccgtattcttttgtcggaataaacggaataaataatgaagaaccgttaccgatcatgtgtaaagtggaaaatgaatagctgctttacacaggtgacggttctttttttatgaaaattcttgagtatgtcacgttaccgtgataaaataaatgaaatcactttgtgatttcatttatgagcaagtagcgaagcggattgcgaatatccgtttgattttattatggaagagggacgaatgacatgcagttttcaaaaagactggaccgatttggagatgaaatttttgctgctctgaacaaccggcgtatggagctggaagcacagggcatgaagatctataacatgagtgtgggaactccggatttcaagactccggaatatatcaagaaagctgtagcggaagcagctatggatgacaacaactggaaatacagtctccgtgatctgccggagcttctggatgcagtctgtatttattataagaaacgttttgatgtggaactgacaccggacatggtaatgactgtttatggaagccaggaaggaatggggcatcttggcatggcgctttgtgatgagggagatacagtacttcttccggatccgtgctatcccgtatttgcagcaggaagtctgatggcaggagcagttccttactattatccgctggttgcagagcatgattttcttccctatgtaaagggaattccggaagaaattgcgaataaggctaaatatatggtagtatccctgccgtccaacccggtaggaagcattgccactccgggactttacgaagaaatcgtggaatttgcgaaaaaatatgatattctgatcattcatgataatgcgtacagcgatattatttttgacggggcatttggaggaagttttttgaccactccgggagcgaaagatattggcgtggaatttttcagtctttccaaatccttcaatgttacaggcgcaagacttagctttctggtaggccggccggatgtgatcgcagcgctccgcaaattgagaagccagatcgacttcggcatgttcctgccgcttcagaaagcagctattgcagcacttcagggaccgctggacagcgtaaaagaacagtgtcagaagtaccaggagagaagagatgctctctgccagggacttcgtgatatcggatgggaacttccaaatggaaaaggcaccatgtttgtctgggcgaagatcccgggtggccgcaccgacagcatggcattctgtatggaactgatggaaaaggccggcgtcatcgtgactccgggagcaagctttggtccccacggagagggctacgtacgtttcgccctggtacttccgccggagaagatccgggaagcagtggaagcgatccgaaaaagcggattaaactgaataactgaaagttgttcaaaatccgatctcaagccatgaaaagattacttatcagcgtttaagccgctgtggatcttaaatgatccgcagcggctttttcatctcgtggatgaaaggctgacctgttttgtggcagagaagcatttcgtaaagattggaagccgcacaggtttcattaaaaagtcgaagcgcagtttcatcgaggatcgcagatgcatcggcggctttggtaatcaacgggatcgaggagtttttcttgatctggctgagaagcggagcactgtttttttgaaagccaagtacccgggcatagggaatgtgtccgggtgcttttgttttttggtcaagaaagatccggacaaggctgcggcagatagcagaacgggtaatatcccgtgttttcaaaagatccgcaaactgggaaaaaccttcatattgatttcgggatttcaggatacgccggatcagtgcatccgaaagctccggatacatttttaaagtttcttcggattcctgaagcagtttgtaatgcagaggaagatccagtgctgagtcagaaagccatgctccttttttgagagaatccaggaatccgggaagggaagcagaagggatcaaccgggaaaaatcagcagactgcacagttccttcggattttttcataaggctccggatgccggaagcagaggggaattcttcgtcggaaagaagagaaaaatccgtatcatgataaccacatccctttcttaaaagtgcatgaggaaggatacggctgttaagacggagaagcgctttgcagtattcgattcccaggatgttattgggagaagaaagaatgagttcaatatgttctgatgaaacgccgaatgtgttatgcacggaagtggctttttctcgcatgtaacggatcaaagcactgcttcttgcagcaggaaaactcattccggtacgaagattctgctgaaggagtttgcggtattcaaacggttcctttataagaatctgtgcaatattcataagagtctctgtatctccgcattcacttccgaaacatagctcatctacaacaccaagcccgtcaagaaggcttacgccacctgcggcaaatccttccgcactggccgttgctgtctgtaccggcatttccaggatcagatcggcgcctccgagaagagccatctcagcccggagatgtttttccataagggcaggagcccctctttggacaaaatccccgctcatggcgaccacaatataatcagcaccaaggatctcccgggcatagcggatctggtattcgtgacctttgtgaaatgggttatattctgcaatgattccaacaactttcatataaaaaagtacctgccatttctgaaaattataatggtgctattttaacataagcaatgtaaaaagttaagcggcattcgaaatctgttttgctgccataaacccgaatgctgctgtccgctctgggcacggcaacaccctttgtgagatacagaaatcacgcaaatttataattatgcgccgaaatcctcgggccatctgtgatctttatccacaaaaaacacatcgcagaacattgtcggtaaacagtaacaattgcacttcaaaaaatacgcagtatagccattttctgacaatgaaacgcttgaaaagaaaagggtaagggggtataataaacatagtgtagtgcccgaacagacactagcgtttttgttacatcaagaaaggagccatttaatcatgggatttgttgaactgcttaaaaaaagagcaaaagaaagcgtaaaaacaattgtactgccagagacagaggatatgagaactcttgaggcaactgacaagattctgaaagagggagttgcaaagatcatcctcatcggtaatgaggaagagatcaacaagaaagctgcagagggcggctttgatatttccggtgcacagatcgtagatccggagaaatctgacagaactcaggcatatattgataaatttgtagagctgagagcaaagaagggaatgacacctgagaaagcgaaagagatccttcatactcagtacccatactatggcgtaatgatggttaagatgggggatgcagacggtatggtatccggtgcatgccattctacagcagatacacttcgtccatgccttcagatcctgaagacaaaaccgggaaccaagcttgtatccgcattcttcctgatcgttgttccggattgcgagtatggtgcaaacggtgcattcgtatttgctgattccggtctgaaccagaacccgactccggatgagctttctgcgatcgcagcatcttctgctgagtcctttaagcttcttgttcaggaggagccgatcgtagctatgctttcccactccactaagggaagtgcaaagcatcctgacgtagataaagtcgtagaggctacaagaattgccaaagaggagcatccggagcttaaacttgacggagagttccagcttgatgcagctatcgttccaagcgtaggcgcatccaaagcaccgggaagcgaagtagcaggtaaagctaacgtactggtattccctgaccttgatgcaggtaacatcggatacaagcttgctcagcgtcttggtaaagcagaagcatacggacctgttacacagggtatcgcaaaacctgtaaacgacctgtctcgcggatgctctgcagatgatatcgtaggtgttgtagcgatcacagcagtacagtgccaggcagaggataaataattattaaaagatcaggagagttaaatcatgaacgtattagttatcaactgtggaagttcttcattaaaatatcagttaatcgattctgagacagagaatgtacttgcaaagggtctctgcgagagaatcggtattgacggaagactggtatatcagaaagccggatgtgacaaagagatcacagaggcagctatgccaacacataaagaagcaatccagatggtactggatgctcttacaaacgataaaacaggtgcaatcggaagccttaaagaggttaatgcgattggacatcgtgtcgtacacggaggcgagaaatttgcttcttctgcagtgatcacagacgagatgatcaaagcagtagaagagtgcaatgaccttgcaccgctccacaacccggctaacctcattggtatccgtgtatgtgcagagcttatgccaggcgtaccacaggtaggcgtatttgataccgctttccatcagacaatgcctgctaaagcatatctctatggacttccgcttgacttctacaagaaatataaagtaagaagatacggtttccacggaacatcccacagcttcgtatccaagagagctgttgatttccttggccttgacaaagacaactccaaagttatcgtctgccaccttggaaacggatcttccatcagcgcagttgtaaatggcaaatgtgtagatacaacaatgggtcttacaccacttgaaggtgttgttatgggaactcgttccggtaacatcgatccggctatcatggagttcattgctaagaaagagaacctggacattgagggcgttatgaatgtactcaacaagaaatctggtcttcttggactttccggcggactttccagcgacttccgtgacctcaacgaggcagctgaaggcggaaacgaggatgcagctaatgccatcgacgttctctgctatagcatcgctaaattcgtaggcggatatgttgcagcaatgaatggtgttgacgcgatcgtcttcacagcaggtatcggtgagaatgcgatcccggtacgtgagaaggttgtcagctatctcggataccttggcgtaacacttgacaaagatgctaacggacatcgtggcgaggaaatcgtgatctccacaccggactccaaggttaaggttgcagttatcccgacaaacgaggagcttgcaatctgccgtgagactgtagcactggtataatcagctgtttcagtaccggtacagaaccgttcgggcatgatcggtaatcaggcagaattatatattactgtggatcagcagtatacattcggggggcggacaattaaaggtccacccccgtaatttaccccgaatttctgattaagccaacagtaacaaaaaattaaaaaaatgtaatattttcccgaaaataacgttgacaaatcacaagaccatatgtataatggattgagtgtggataggagagacttatgcagattcatttattagacatttcttcctgtgatggcaagacgatccaggaatcagttattcctgaactggagaagattgattttcagatgggaagttttccggtacttgcgaaggaaccggtagagcttacgatcaccaataccggtgataaggttcttgagcttacaggaaccggtaagatcacagtgggcattccctgtgaccgctgtcttgagacagtagccgtcgagatgccgttggaatttaagaagaagctcgatatgaagctttctgatgaagagcgtgtcaatgatctggatgaaagcagctatctcacaggtatgaacctggatgtggaccggttggtctatcttgaggtattgatatgctggcctttaaaggtcttatgtaaagaagactgtaaaggtatctgcagccgctgcgggaagaacctgaacgaaggtccctgcggatgcaaggaggagcctaaggatccccgcatggcagctatcagtgatatattcagtaaatttaaggaggtgtaacctatgtccatttgtcctaagaacaaatcttccaaagctagacgtgacaagagaagagcgaactggaaaatgagcgctatgaaccttgttaaatgtagcaaatgtggagcacttatgatgccacacagagtttgcaaagcttgcggaagctacaataagaaggaaatcatcaaagttgaggactaattttaattagacagtcaatatatgatgcgaaaagagtctggtatgctgagataagtataccggctttttttatactctggggggaaataaaaaaatatgaaacagaacaagaatcagaaaaataccgccgtgaaccagatcacagagggtgtgatctggaagcagcttctgatattcttttttccgatcttgtttggaactctgttccagcagatctacaatactgccgatacagttgtagtaggccgctttgtgggaaaagaagcattggcagcagtaggaggctcatccagtatgatcgtgaatctcatcgtaggtttttttgtaggtttatgttccggtgcgtctgtagtgatttctcagttttacggagcgaaagaccacaaaaaccttaaaaaagcacttcacacatccatgatcttctgcctggctgccagtattattgtgggaacagcaggttttatcctggctgagccgatccttcacctgatgaaaacaccggcagaagtaataccggattctgtgttgtacctgcatatctattttgcgggaacattttttaatctggtctataatatggtatccagtatcttaagagcagtgggggattccaaaagaccgctctatgtgctgatcattacctgtttgttgaatattttgctggatgttgtatttgtagtgatcttccatatgggagtcctcggtgttgcacttgcaacagtcagctgccaggcagtcagtgccatccttgtaacctggttcctgatgcgcgcagaggatatttatcgtctggaatttcatgagattcgttttgatctccggtcttttggggcagttctcaggattggacttccggcaggactggaatcggtgatgtataatattgccaatctcaccattcagatttttgtcaatgaactggggactgacacagttgcagcctggggaactatgggaaagattgatgcggtgttctggatggtatgcaatgcttttgccatctcaattaccacctttgtgggacagaattatggtgccggaaaataccaccgcatgcgaaaaagtgtccgcgtctgtatggtgatggcatacatttcggcgtttattgtaagcggagcacttattctgttcgcaaatccgatctaccatttgtttacaacagatcaggtggttgtagacattggggtgcatatgatccgtttcctgattccgtcctatgctatttatgttgtgatcggaattctttccggagcgctgcgtggtgccggaagagtactggttcctatgattttgacctgtggaggagtctgtcttttacgtatcatctggttgtttgcttttgtaagatctcatccggggatcgacagtatcatgctcagttatccggtgtcctggataattactgcggtactgtttgtcatctattattttcggcgatttccaggtatgcagaaaaagaaataacgatatatgaaaaggtgctgattctgtgcaatagcagtgatcagcacctttgttttgttcgaaagatgtcgatttattacgtatagatttgattgcctgaaagctgaaaaagaggtattctggatgcagatagatgaaacatatgtaatggggatgaccagatatgtataatctgcaaaaaacaatacgatatggtttttggttgatacttgaagttattgcgctgtgtgtcggtatgatttatagcacgaggactgtacgggctgaacctgaagtacagcagccggccagaaaagtaacagaagttgttactgaaaaatggactgtgatcagtggaaaacgtctggatcttatcctgaaatatatgggagatataaattttgaaaaagaaggaatcagtcttcgtatccctgcttctgtggcacaaagctggaaggtagcagagaatggtacaatacaggcactggtacaaaaggtttccaatcattcatatgaaataaagatctataaaggcactcagaagatcacggatattccggggagccggatcatgataccggtaaaagagatgtttcccaacggagatccggaaactatggaaattacggattcccgaggaagaaaactaaagacattcctggataaaaagcaggatcttctgatcgttgacacggacgagacaggaatcttctgcgtaagaggtcggaaaatagatgatatagaagagaatccttttgcagtggcagtcctgacgacagcaacaatgataacagtgctgatcgtaggaatccgaagcagatccggaaagcgaggtgacagtcataaaggagaaaagtaggcaatggaccctgatctttggacttactgtggtgttatctatgactgctttttttatgatgtatctcataaataatgaatatacagcgaaaggcgagcagcccattcagggaatcctttgtctggatgataaagatgcggcggcaaagctacattatcttgccagggaatggcaatattttccgggaaagctgcttacacctgagatgctgaaaaaggatccaggatattacagttgttatatttcgatcggagaacgtaatgaaatggaactggggaataaagaggcttctacgtatggatgtgggacataccggatgtttctgatcctgcccgaagaggaaaaaatctgggcgatatctatggcggaggttttttccgcataccgaatctatatcaatggagaactggccggggaagtgggggatcctgacgaaaaaacctatatggaccgggtcatgaaccgtgtttttacgtttcagggatccggggttgtagagattgtcatagcagtagcagacaaaagccatatcagatccggaatccaggctattccggttttgggatctccggtccgtgtaagcatacagagaggactgcgggtactcggaagcggctgtgccattgcgttctgtatctgtatcatgtttgggactcttatggtacatgtcagaaccaggacaaaagaatttgctatttttaatctggtctgtctctgtgtggcaggatattcattatgctccctggtacataatttttttcttcttcccacaaggccctggtatgccctggaaactatgatctattatctgatcctttcctgcatgatccggcttgaggattgtattataggaaaaaaaaggggcatatatctgtttcttttgatcgatctctggatcgtagtagctttctttctggagatttttgcggatatacttccttcagccaggcttctttatgatgttgtctggatcagtgaggcagtcaaatgggtggcagcgatctatatgctgctcaatacttttggagaaacagattgcagatatggaaagatcgttttggtgggaacaacgatttatgcctgttcccttgtggcagatcggatagggtatctttatgagccgattttgggaggaggtttcccggagacaggtgggctgatactgacagctgcgtttggctgtgttctgtggagagatctgtcagaagcatataagatcagtctgacttatgaggtatatagtcatcagactgaacttcgtctccttgcccagaaaaatcattacgaccgattaaaagaacagatggaagaaaccagccgtgtccgtcatgatatgcgtcagcaccttcgtgttctgtctgcattactggaacgtgagcagtatggagaaatgcagaaatacctttgccggtatacccgtgaattccaggaacgtttgacctatcattcttactgtaaaaatcaggttgccgatgcgatcttacattattatgaagaactatgcagaaaaaacgggatcgtttttcagtgtcaggtagaggcaccggaaaaaacagggatccaggatacagatttctgtcgtctctttggaaatcttctggaaaatgccatagaagcggcacagctttgtccgaaaggcagttccagatttgtccgtgtacagatacgtaccagaaataataaacttcttataaaagaagaaaacagctgcacagatcccttacgcagaaataaaacaggatttttttcaggtaagcattccggacaggggatcggaactgcgtcgatcatggaaattgcggcacgttatggagggtttgcggattttcagtctgaaaatggcattttcaaagctgagatatttcttcatctgacgcaaagagatactgaagataggctttacggatagcagaagagccacgtttccggatctggacgacctccccgttgtccagaaggaagccttcttcagaagcttcctgtatacgatccatattgacgacacagccacgataacaggagagaaaattaggacagtcccggatctgctcctcaaatttgtgaaaggtaagataagaacggaccggaccggcgtcggtatgaaggcacactgcatttcggaatgtatctgcatataaaatactgcgcagagggacccggatgggaacccggtcagaaacgacttcaatgtaacgggatgccagtaaaagcctggattgaaaggaatccagaatggaacagagtttttctggctgaaatggtttcagaagataataggaggctcctacatcatagctttccacagcaaaatcactgctggtagtgacaaaaacaaggatgcagctatcggactgtcttcggatcctgcgcgcagcttccatacctgtcattccgtccatataaatatccaggaacaggatctgaaattttccgggctgataatcttcaaaaaattcttctgcgctgaagaaatgacagatttctgcccggatctgttttttctcaaaataggaaacagcgatattcttcagggcttctgcatccgttgagatgtcatcaataattgcaatattcaaaacaatataacctccggtttataaaagagtagtaaaaatagtatatcataattttggcgcatatccaatgtcggttttttgcccgaaatgacgtattatgtagaaaattatcagaaataaaaaattgaggatcatttgatcaaatagatcaagtcacctgtttttattgaaaatatccgtttgaccataaaaatgtcatatttcatggaaactgtcattttgtcacaggtctgttgtcatttcctgataatttttttacaatagcgtcaaaagatacgaaaggcggtggatatacgaaaaataagggcagcagctggcgacaccagaaactgttgaccaagatccagataaaaaacaatcccccaagagggctgtacttctagatttgaggtacagccctttcccctgtcataacagtgattcttgacggaatcgtggaaattcgctatcatggaaatgatttttatatactttggaagaaaacggagaaaatgcgcatgaacattcttaatatagaacatatccacaaaatttttggagataaggtgatatttgatgatatctcctgcggcatcgatcagggagaaaaaataggtatcatcggtgtaaacggaaccggtaagactactttgctccgcgtgatcgccggagaggaagaaccggacgaagggcaggtgatcacccagaacgggatccggatcagctggcttccccagactccggaatttccgcagcatatgaccattctggattatgtggcagaaggcaaatggcagaaggactggagtaccgaaagtgaggccagacgcatgctgaatacacttggtattaccgatcagaatatcaatatggataatctttccggtggtgaaaagaaaagagtggcgctggcaaggatgcttttaaatccggctgacattctgatcctggatgagcctaccaaccatctggacggagaaatggtcatatggctggaagattttctccggaattttcgtgggacggtgatcatggtcactcatgaccgttatttcctggatcgtgtggcaaaccggatcctggagatcagccacggaaaattatattcctatgcaggagattattccagatttctggagctgaaagcgcagagagaggaaatggagcttgccagtgaccggaagcgccgcagtgtacttcggatggaactggaatgggcagcaagaggctgtcgtgccagaagtacaaaacagagagcaaggcttgaccgtttggaagcactgaaggcgggaaaaaccccgctgaaagagcagaatgtggaaatggattccattgagacccgtatgggaaagaaaaccatagagtttcatcatgtaagtaaaaccatcgaaggtcgtcttttgatcaatgattttgatcatattgttcttcgtgatcagcgtctcgggatcatcggaccaaatggctgcggtaagtccacacttcttaaaatggcagatggactgatcttgccggattccggagagattcagatcggagaaacgatccgtatcgggtatcttgcccaaaacgttccggatatggatggaagacagcgagtgatcgattatatccgtgaggtggcggaatatgttccgacaaaagaaggaaggatcacagcttcccagatgcttgagagatttctttttgatccggccatgcagtacaccccggtggagaagctttccggaggtgagaagcgaagactgtatcttttgaaggttctgatggaggcgccaaatgttcttcttcttgatgagcccggaaatgatcttgatattcccaccatgaccattcttgaggactatctggattctttttccggcatcgtgatcacggtgtcccatgaccgctatttcctggataatgtggtgaaccgtattatggcatttgagggagatggccggcttgtccagtatgagggcggttatacggattatctggaagcaaaggaaagaaagggacagtctctggaaatgcgttcagatatgaatggcggtacagtacagggagaaacagctgagcctgagaaaaagaaatctgctgcagatacctggaaacagaaccggaaacagaaactgaaattcacctataaagaacagaaagaatttgacactattgacgatgacattgcagcattggaagaacgtctggagcagattgacaaagagatggctgccaatgccacaaatgcgggaaaactccgggagctttccgacgagcagcaggaaatccagcagaagctggacgaaaaaatggatcgctgggtatatttaaatgatcttgcagagcagattgaaaatcagaaagagtaaaagatattgacttctcaggcaaaactctagtatcataaataacggtacgttaaccggataaactgcgaagcagttattcggttatgagtaggtagcgaatgcggatttcgaatatccgcttaacttttggtactctgcaatgaaaatccttatacggatgtgtatgaggattttcactacagtgtaccatatgcattccgaaaagatttcggacagagaaaggacaacatatgtcagaaatggtaaaagtcgttgtagatgcaatgggtggtgacaatgctcccgaggaaccggtaaaagccgcagtggaagctgtgaaagaaaaagagaacatccaggtcatccttacaggagtacaggatgtgatcgaagcagagcttcggaaatacccggattatcctaaggacaggatccgtgtggtgcatgcgtctcaggtgatcgagactgcggaacctccggtcatggctatccagaaaaagaaagattcctctattgtagtgggattaaatcttgtaaaaaaacaggaggccgatgcctttgtttcctccggaagcaccggtgcggtactggtaggaggccaggtgatcgtaggcaggatccaagggatccggagaccacctcttgctccgctgatccctacggcaaagggcgtttcccttttgatcgactgtggtgccaatgtagatgcgagaccagatcatctggtacagtttgcgcagatgggttccatctatatggaaaatgtagtgggtattaagaaaccaagagttgctatcgttaataacggtgctgaggaagaaaagggcaatgcgctggtaaaggctaccttccctctgttaaaagcatgtaaggatatcaatttcatcggaagtattgaggcgagagatatcccgtcaggttatgcagatgtagtagtctgtgaagcttttgtaggaaatgtgatcctcaagctttatgaaggtgttggagctactctgatatctatgatcaaaaaaggtatgatgacaaacattcgcagtaaaatgggagctctgatggtaaaacctgctcttaagaaaaccttaaaatcatttgatgccagtgaatatggcggagcaccgcttcttggtctgaaaggtcttgtggtcaaaagccacggaagtgccaaaagcgtagaaatccgtcatgcgatctttcagtgcgagcagtttaaggaagagaaaatcaatgaaaagatcgaggagtttatagcagccgagcagaaagcacaggcagaagaaaaaagcgaaaaaaaataaaaccgggattgccggaaatattacagacagaacaggaggcgaacagtcgtggaactggaaatgctgaagaccatcatcgaaaaaactctgggaagaaatatggatgccattacagaaaaaactacctttgtggatgatctgggagtggattctctggatttttttcagattcttattgatctggaggaaacttttgatgttcgtatcgccccggaggaagccgaggagatcgttactgtcggcgatgcagtggagactcttcgccgggtaacgaagggaagaagaaatggaaaataatttaaaaaagctggagcagactatcggataccagtttaccgcaaaatctttactggagcaggcaatgacacacagctcctatgccaacgaaaaacaccttggaaagcttggatgcaatgagcgtctggagtttcttggagatgcggtgctggagctgatcagcagtgatttcctgtacaaaaaattccggaataatcaggaaggtgagttgaccaagaaacgtgccagcatggtatgtgaaaagagtcttgcctactgtgcaagagaattcgggcttccggagtttatcctccttggaagaggtgaggaaatgatgggcggtcgtaaaagagattccatcgtttctgatgccctggaatctctgatcggggctatgtatctggacggtggatttgaaccggcacaggcttttgttatgaaatttatcctgaacgatctggaggataagaggattttttatgacagcaagacagtgcttcaggaaatggtacaggaaggcggaaatcatccggtggaatatcgtcttctgaaagaagagggaccggaccacagcaagagctttactgtggaggcgctgatcaatggaaaaagtatgggaaccggaatcggccatacaaaaaaggcagcagaacaggctgcagctctagaggcaatacgcagtataaaataacagcaggtggccaatgtatctgaaaaatatagaggtgcagggatttaaatcctttgcacagaaaataaattttgaatttcataacgggatcaccggcatcgtaggacctaacggcagcggaaaaagtaatgttggcgatgcagtccgctgggttctgggagaacagagcgccaagcagcttcgaggcgggaatatgcaggatgttatcttttcaggaacggagcttcgcaagcctctgagctttgcgtccgtggctattacacttgataacagtgatcacaagctcccggtggattttgaagaagtaaccgttaccagaagactgtatcgttccggtgagagcgaataccgcatcaacggcagctcctgtcgtttaaaggacatcaatgagatgttctatgataccggtatcggaaaagaaggatattccatcatcggacagggtcagatcgataagatcttaagtggaaaacccgaagaacgccgagagctttttgacgaggcagccgggatcgtcaaatttaaaagacgaaaaaataccacactgaagaagcttgaggaagaacaacagaatttggtccgtgtcacggacatcttaagtgagctgaccaagcagctggaaccgctggaacgtcagtctgagactgcaaaaatatatctggcaaaaagagaaaatctgaaagagctggatataaatatgttcctcctggaatatgaacacaccggaaatctgatccgcgagctggaagaaaaaaccaggatcgcagaaaatcagttaaaagaagcccaggatgctcatagtcgtaccaaggatgaatatgaacgtctggaaaaaatactggaagagctgaatgagcggatggaggcgttgcgggaagaaagccgggatcgtgctatccgtaaacaacagctgtccggtgagatcaatgttcttcatgaacagatcctggcaggagagcagaatgatagtcattatcgcagccgtcttttagcagttcaggaagatacggagaaaaaatctgcagaccaggaggctctggaagagcaaaaagcagatcttcaggcaaatttacgggagatcgatagaaaacttgctgacgagcagaaaaaaatggacaatatccagagcagcatcgaagaatgcacccaggcagtggaagatggtaagaatgagatcattgagatccttaattcccgtgcaaacaccaaaggtaaggcacagcgttttgatgccatgaaggagcagctggatatccggaaagcagggatcagtcagaggatcctttccctgaaaacccaggaagaggagcagcagtcagcgatcgatcaggcacagaaggaatacgacactatcacgaaggccattcaggaaaccagagaagaaggcagccgtcttacaaaagagatacatgccatccaggaaacccttaaacagcagaatacacagctggaaaaggaacagacgtcctatcatagagaggcatccagactggaatccctccgcaatatcacagaacgttatgatggatatggaaacagtatccgccgtgtcatggaacagaagaatcatgttcctgggatccgtggcgtagtggcggatatcattcacgttgaaaaaaattatgagatcgctattgagacagctcttggcggaagtattcagaatatcgttacggataacgagcagactgccaagcagatgatcgaattcctgaaaaaaaaccggtatggtcgtgcgacttttctcccgttaaacagcatttcttcaagaggcgagtttaatcaaagaggtgctttgaacgaaccgggagctattggtcttgccagtggcctggtaactgcagagaaggaatatgacggtctgatcggttatcttcttggcagagtgctggtggtggatcatatcgatcatgctattgccattgccagaaaataccgacacagtatccgtatggtaacgttggagggagaatccttaagtccaggcggttccatgaccggtggagcttttaagaacaacagcaatcttcttgggcgtcgtcgtgagatcgaggaactggaaaagaaggtaaaagagctggcagccgggtatcatgagatccgacagtccatggaagataaccgcagcagaagaaatgagatgcgtgatactgtggcggcgctgcagcagaaatttcaggaacaatccattcagcagaatacagccaggttgaacattgaacagctggagaaaaaagcggaggagatccgcggcggttataccaggatcgagagggagcaggaggagatccgtcttcaggcaagagacatgcaggcagataacataaagatcacgcaggaacttgaagcatccaaaagggatgaggaagagctggaaacgtttatcgagacccggcagaaggagctggaggactggaaaaaggacgaagcggagacttcagagaagctggaaaggatccgtcttgacgcatctgcatcccagcagaaggaaagcttcataaaggaaaatctgcggcgcctgaaagaggagatcgaagttctttcgaaagagagggaagaaattctggattctctggaaaaaggcagccaggaaactgcagaaaagagaaagacgatcgacaaggtccgtaaggagatcgaaggctttgccgcaaaagaagaggcggctgcaaaacagctggaaaaatggcagcaggaaaaggaagagcgcacaaaaagccataaggagttttttgaaaagcgtgatgagctgtccggccagatcagtcttctggacaaagaatgcttccgactgaagactcaggcagaaaagatcgaagagaaccgggaagcaaggatttcctatatgtgggaagaatacgagatcactccgaataatgccttgcagtacaggaaagaagaaatgaatgacaggcatgtgatgaagcagcagatccataaattaaaggacgagatccgagctcttggctctgtcaacgtcaatgccattgaggattacaaagaacttctggaacggcatacgttcttaagcggtcagtacaacgatctattggaagcggaaaaaacgctggaacagatcatccaggagttggatgagggcatgcggaagcagtttagcgaaaaattcggagagatccagaaagaatttgacaaagccttcaaagaactgttcggcggaggccggggaactctggaacttgcggaagacgaggatatccttgaggcagggatccggatcatttcccagccgcccggaaaaaaacttcagaacatgatgcagctttccggtggagaaaaagcactgacagccattgcacttctttttgcgatccagaatctgaagccttcaccattctgtcttctggatgagatcgaggctgcactggatgattccaatgtaggacgttttgcgggatatcttcagaagttgacgaagaacacacaatttattataataacacatagacgtggtaccatgaatgcagcagacaggctttatggaattaccatgcaggaaaaaggggtatccacgctggtatccgtagatttagtagagaaccagcttacccagtagcagaggggatgaatcagtatggcagaagaaaaaaaaggattttttaaacgtctggtaagcggacttaccaaaacgcgagacaatatcgttgccggatttgattccattttcagcggtttttccagtattgatgatgatttttatgaagaactggaagagatcctgatcatgggagatatcggtattaatgcaaccacctccattctggagcatttaaaggagcaggttgctgagcagcatatcaaggagccgtcccagtgcaaacagcttctgatcgacagcatcaaaaaacagatgcaggtagaaagcacagaatatgagtttgagaatcggaaatccgtgatccttgtgattggtgtcaacggagtcggcaagactacctccgtaggcaaattggccggtaaattaaaggatcagggaaaaaaggtcatcctcggggcagcagataccttccgtgcggcagccggggagcagctgacacagtgggccaaccgtgcaggcgttgagatcatcggcggccaggacggagcagatccggcatctgttgtctatgatgccgtggcagcagccaaagccagaaatgcagatattctgatctgcgataccgcaggaagacttcataataagaaaaaccttatggaagagcttcgcaagatttaccgtattctggaacgtgagtatccggaagcatatttggaaacgctggtagttcttgacggaaccacgggccagaatgcgctttcccaggcaagacagtttgccgaggtcgcaaacgttaccggaatcattcttaccaaacttgatggtacagccaagggcggaatcgcagtagcgatccagtctgagcttgacataccagtaaaatacatcggagtaggcgaaagtatcgatgacctgcagaaatttgatgcagacgcatttgtaaacgccctctttgacgtagaagaaaggagctaaatacaaatgcttacattagagagctttgaggaagcggcagcaaaagtaaaagaagtgacacaggaaacaaagctgatatacagcagttatttctcagatatgacgggaaataaggtttatctgaagccagagaatatgcagcgtaccggtgcatataaggtgcgtggcgcatattacaagatcagcacactttctgacgaagagaggaacaaaggtctgatcactgcatctgcaggaaatcatgcccagggtgttgcttatgctgcacataaatatggagtaaaagcagtcattgtcatgccaactaccacaccactgatcaaggtagagcgcaccaagagttacggtgcggaggttatccttcacggcgacgtatatgacgaagcctgcgcacacgcacttgcccttgcagaagaaaaaggatatacctttatccatccatttgacgatccggcagtagcaaccggtcagggaaccatcgccatggagatcgtacaggaacttccgcttgtagattacattctggtaccgatcggagggggcggacttgctacaggtgtctccacacttgcgaagcttctgaacccacacatcaaagtcatcggtgttgagccggcaggcgcagcatgtatgaaggcatccctggagaaaggggaggtcgtaacgcttcctcacgtaaatactatcgcagatggtactgcagtacagactccgggaaaaaatatcttcccatatatccaggaaaatctggacgatatcattaccatcgatgatgatgaactgatcgtggcttttctggatatggtagaaaaccacaagatgatcgtagagaactcaggacttcttactgtagcagctctccgtcatctggatgtaaagaataagaagatcgtttccatcttaagcggtggaaatatggatgtgatcaccatgtcatcggttgtacagcacggactgatccagcgtgaccgtatctttaccgtatccgtacttattccggataagccaggtgaactggtacgtgttgcaagtgtgatcgctgaaaatcagggtaatgttatcaaactggatcataaccagtttgtaagtaccaaccgaaatgcagccgtagaacttcggatcactatggaagcattcggaacagatcataagaatcagatcgttgcagctctggaaaaagcgggttgcaaaccgagagtggtacgtgctatactgtaggacatgttatattgcaataactgaaacttctgaccggactgttgcatatgatgtaacagcccggtcttttgcgaaaatacctgcatagacagaaaggacagataaatatgtgtggaattgtaggatttacaggtagacaccaggcagctccgatccttttagatgggctctccaagctggaatacagaggatatgattccgctggaatcgccgtacgtgacggcgagggcgagacggaagtgatcaaagccaagggaagactgaaagttctgtcagaaaagacaaacggcggagagactgtaccgggaacctgtggtatcggtcataccagatgggcaactcatggtgaaccttctgagaacaatgcacatccgcatatgacagacgacggtaatatcgtagcagtccacaacggcatcattgagaactatcaggaactgaaaaataagctcgcccgtaaaggctatactttctattctgagaccgataccgaggtagcagtcaagctgatcgattattattacaagaaatatgagggaacaccggtggatgccatcacacattccatggtacgtatccgtggttcctatgcccttgcgatcatgttcagggattatccgggtgaaatatatgtagccagaaaagacagccccatgatccttggagtggcagaagatgaatcctttatcgcttctgacgtaccggcgatcctgaaatacacccgcaatgtatattatatcggcaatctggagatggcgcgtgtgaaaaaaggcgaagtcaccttctacaatcttgatggagatgagatcgagaaagagctgaaaaccattgaatgggatgcagaagcagcggaaaaagccggatatgagcatttcatgatgaaagagatccatgaacagccaaaggcagtactggatacgttgaattccgtgctcaaggatggaaagatcgacctcagtgaagttggcctggaagaagaaagcatccggaacatccagcagatctatatcatagcctgcggctccgcttatcacgtaggaatggcagcacagtatgtgatcgaggatcttgcacagatcccggtaagggtagagctcgcttccgaattccgttaccgaaaaatggcccttaacaccaacagccttgcagtgatcatcagccagtccggtgaaacagcagacagtcttgcagcacttcgtaaatgcaaggaaaatggtattcgtacactgggaatcgttaatgtagtgggatcttccattgcacgtgaggctgataatgtattttatactctggccggaccggagatttctgtagctactaccaaggcgtacagcacacagctgatcgcagcttatacactggcgatccagtttgcaatggtaagaggaacgatcacagaagaagcctacagcaattatatcagtgaactgcagacacttccggataagatctgtaagatcctggaagataaggaacgtatccagtggtttgcctcaaaacaggcaaatgtaaaagatgctttctttgtaggaagaggaattgattacgctatcagcctggagggcagtctgaagatgaaagagatcagttacattcactctgaagcctatgctgccggagagctgaaacacggaacgatctccctgatcgaagacgggactcttgtgatcggtgtgctgacccagccggatctctacgaaaaaacagtcagcaatatggttgagtgtaagagccgcggcgcctaccttatgggcctgaccacatttggtaattacaatatcgaggataccgcagacttcaccgtctacatcccgaaaacagacccgcactttgcaacatccctggcagtgatcccgcttcagcttctgggctactacgtaagcgtagccaaaggactggatgtggataaaccacgaaatctggcgaagagcgtgacagtggagtaaaaaatatatatggactatagagaaagcctcagagtatgtatatgcgaaaatactctgaggcttttttataaaatctttacgcaaaaatagtttcatggtatcatatagacatatgatgctgtgaaattattttgcttttcaggggatattaagaaggggtgacgggtacatgcttatgccggtagtgccagagaggagattgaactgaaaccagagtgcccggacagccatagagcagataaaggagaaaaattatccggagtctttacagaaatgtacagggaatatcctggcttgtggggatcaattataacaaaccaatcaacagtggtaagcttttggagctgctgtcacagtacaaataataagataggaaaaaatatatgaagaatacagtggtgatctttaatgccggtatcggtgcgctgactcttggttttcaaaatgccggttatgagattttgaaagcatatgagccggacagaaaagtgatagagatctatcaggaaaatataagtcaaaatgtaactgcatgcagcctttcttccatagatcctgccacagttccggacagtgatgtctgggcttttgatctgacgcagtcgaaagcagaagaggtgttttatagtttgaccctggtgcaaagaagacgaccgccggccattctttttgttatgaaaaagcaattatggaaagggttcataaaggagcacatttttcagctgcaagaatatggataccatatcacgcataaaaatatccagagttcggaggttactgcatttccgctgcgggaagaatttgcatatattgtttcaaaaagagtgaatgcttcggatatgatcatgccggtgcaggtccataagagtagtatcctgttggatggctgggtggaaatgaatccacaggattcctggtattacagaattgattttgcgaaagagaagattgatgcttcgcatgccggtgacagcgttttgtgttgggaaaaaggcggttatcgggaatccgggcaggttcgtctgaatctgataaaaatgccgctgatccgtatccatggcgtctatcataagatcacacacaaagaaatagccagattaaagggatttccggaagattttccacgttctgtgccaaacaaaagccggatgtacagaagcctgatatatgcgccgaacataaaagtgacagaacaggtcgttcgcaatctctgcgtagaaccctatataaattcagagggtgatgtgcagatgaaaaactgggaaaatatggcccgctttaagcagctttttgaaaaataccttacatataaaggggtttctttccaaagcgatgaatgggtctttatgaccagaatgtacagtgattccaaagaaatcgctacacttaaacggttgcagagttatagccgtctggttggaaaagcagtgtcagatcagaaaaaggatctgccattacaaaatatctgtgtagtggcgaatctggtctctgatgagactaagagaaagtacgaagaggcgaagcttggatatgtctgggacatccgaaatgtgctgtggctctttgaggactatccggaactgaagaacgaactgatctcgattctgaattattcggtggaaaacatagaaccggagagaccggagccttttatctttgaggaaagcagccagatggagaatacggatccggaatcggttgctgacagctatatagcgcagttaaaagtgttggagaccggtagtgcagctttcaagaaatatgaggaactttgtgtttctattctgaaatatatccttggagaatatctgactttgtgggagcagcagaagacaacagaggaagatctgtatcgttttgacatgtgctgtaagatcaaaaacggggtgacacaggatttttttgacacgatctgtaagtatttttctacgaagtatatcgtgttcgagtttaaaaactatgaaaagcctattactcagagggaaatttacactacagaaaaatatctgtacgaaaagctctccgtaaagttgcgatcattatttccagaaaaggagcggataaacatgcgaaaatggctgcacggggaagtctacgggaaagcgggaaactgatcatctgcctgtccgatgaagatttgaaagcgatgctccagataaaaaaagaaggggaaaaaacaacgggagggtatttggaagatattttggatgatatgctgatgcgcctggaaaaatagaaaattttgtgaaaaatcactcaaaaatccccatttcgagggcagagttttggaagataatccgctgccttcgaatttttttattttcgaaataaatctgttgttgtaatatggaaattgatgtggcataataaatgggaaaatgttaaaaataagaaaaatccagattaaggaaatgtaaagtcgcattttcaggataacatggctcctgacaggttatgacaggaagcgagtatgacaaaggagaaaattatggcaattttttcaatgatcttatctttgttgtgtggagtatcattatttttgtttggtatgtccctaatgggcgatggtctgaagctggcagcaggtaataagctggaagcatttctttataagatgaccaatactccgctgaagggtgtcgcacttggtactggtgttaccagtgtgatccagtcgtcttctgcgacgacagttatggtgatcggttttgtaaactccggtatgatgaaactgaaacaggcgatcggtatcatcatgggagccaatatcggaaccagtattactggctggatcttatgtctttcttatattgaaggatctaatggaatcgctagtgttctttccacagcaactatttctgctgttgtggctgtagttggtattattttccgtatgttctgtaagcgtaccttacataagaacgtgggaaatatcatgcttggttttgcgatcctgatgacaggtatgcagatgatgagtggtgcggtatctccattgcgtgagagtccgatgttcatcaagatgctgactatgttttccaatccgatcgcaggtattctcgtaggtatcgcttttactgcggtactccagagtgcgtctgcaacagtcggtgtgctccaggctctttccgtaaccggtatcctgacatttgcaagtgcatttccgatcgttcttggtatcggtgttggtgctgcatgtccagttctgatctcagccatcggagcaaataagaacggtaaaagaacggctcttgtatatctgatcaatgacctgtttggtctgattctctggtctgtgatcttttataccgtgaatgcgtttgtacattttacatttatggatatgaccatgacaccggtagcgatcgcacttttgaatacggtgttccgtctggcaacggttatcgtgctgtttccattcattccaaagatcgagaagctggtatgctggcttgtgaaggatgacaaagaagatctggaagatgaggcagactttgatcttctggaagagcgtcttctgaattacccggcccttgctatcgcacagtgtcaccgtgtaatgaacggaatgtccaagaagctccgtaagaatgtcaacagagccatgaatcttctgaatgattatcagcaggataagtatgataaggttcagcgaaaagaggatctgatcgacaagtatgaaagtcgtctaggagagtatctgatccagctgacaaagagagagatgaattctgcacagacaagacagacttcactgtatctgcatacgatcaatgactttgagcgtatcggtgatcatgcttcttacattgctcatatgtccaatgaaatgcatgataaccatacgaatttttcacaggaagcctgggatgagctgaatgttgttatggaggcagttcgtgaggatatcaatataacctgcaatgctttcatgaaagatgataaagaaatggcacagagagtagcacctctcggagctgtgatcacaggactttgtgatgtactgaagatgcgtcatgcagagcgactgagccagggcaaatgcggactggaagagggaacggtatttagtgatatccttaacagtttctgtcgtatcgcaactcactgtgcaagtgctatggtggcacttatgaagagcggagagacaggatctgatcttcatattcacgattccaagatctatcccacaaacagtgcggactactaccagtatttcaaggaatacggacagaaatatgatattggaaatcaggaaggccatatgctcagcatggagccggaagaagtagaataagaaattcaggcagcggaaatgtagatattccgctgccgtttttgttagggatttgccctaacaatgaaaaaagaaggggctgtcgcactaattttttagtgcgacagcccctttgtactgaggtgattatagttcagagaacaaaatatgtcactcctctatttttcattactttttgtaaaaatcatataattgctgataattagtaataggggttatcaaaatacagatttcatgatatgataaacctatcagatagcgtgagacatataatggggatatgtatctcgcagcaagaaaagggaggtttttattatgggtgaaagtatgatcacatcgtttgacggaacgaaactgtatctgaaaaaagaaacggcagcagacaataaagctgtgatcgtgattgtccacggactttgtgagcaccagggcaggtacgattattttgcggaaaaacttcatgaggcgggaatcggaacctatcgttttgatcacagaggacacggacggtctgagggtgaagagactttttattcagatttcaatgagcttctggacgacaccaacgtagttgtggatatggcaattgaagaaaatccggatgtcccggtatttcttcttggacacagcatgggcggatttacggtttctctgtacggagccaaatatccggacaaaaagctccgggggatcattaccagtggtgcgctgaccgcagataacggcaatctgatacgtggtgtgccgggagaaatggatgtacatacgcgtcttgccaatcagctgggttcaggtgtatgctctgtacaggaagtggtagactggtacggaaaagatccatacaataaacagtcctttacagcggggttatgctatgcgatctgcgacggacttgactggttcaaagagaaaaaagcagagttccattatccggtccttatgacacacggcgagaaagacggtctggtaagtgtacaggatacctatgatttctttagggaagcaggatcaaaagacaagcagatgaagatctacggcggactttttcatgagatcctgaatgagtattgtaaagatgaagtgatcggggatatgatccggtggatggaagtgaggatctgaatataaacaaattgttttacaagtagcagcaaagccaggtggaaacatataacacctggctttcttttgcaaagagattctgttacaatagcaggatgaaaacaagaagacagaacaggagaaaaataaccatgtcaaatatcatagaaatcacagatttcaacgctccggagctggatgtatatgccaggatctcggagatacagcttttgaaccgggcagaaccggagaaggggatctttattgcggagagcccgaaggttattgagagagctttggattccgggtgccagccgatttcttttctggtggaacataaacatgttgagggtgaggcaaaagaactgatccgtcgttgtggagacattccggtttatacggcagaatttgatgtgctaacgcagctgaccggtttcaagctcacaagagggatgctctgtgccatgcaccgacaggctcttcctgatatagtcgatgtatgcaaaaatgcccgcaggatcgcagttctggaaaatgtggtaaatcctactaatataggcgcgatctttcgttctgcggcggctcttggaatggatgcggtactgctgacaccgggatgcagcaatccattgtaccgccgtgcgatccgtgtcagcatgggaactgtatttcagataccatggactttttttgatgaaaaaacagagtggaaaacggaaggtatccggtctctgaaagcgatgggatttaagacggcagccatggctcttaaggaggattcttttgatattgatgatcctcatctgatggcagaagaaaaactggcagtagttcttgggacagagggggatggccttgcttcagagaccattgcggactgtgattatacagtatgtattcccatggcccatggagtggattcactgaatgtggcggcagccagtgcagttgcattctggcagctgggaaaacactaaatatttaagagagttcccgttttttatgatcttgcattctgattttcttcctccatatccatcagatgaaaagaaagcagcagatacaggatctcgcttctgtctgtaaggtctgaatccagaaaagctttgatcttatccagacgataaagaagagtgcttctatggataaataaagcgctggcagtgtgagaaatgttctggttatgctccagaaaacaacgcagtgtttcatagagatgagattgctttgcctcatccttgtatttcattgacagaagcttttcgtgacagatcatgtaagcaggaagctttctggtagcctgttccaggatatagggcagagcaatggagtcaaaatagtggatactttctgcgggatttttgcgtttgccgacctgcaaggtgacagaagcctgtgtgtattgacggtggaaattgaaatgtccaagcatcttccggctgtatccggcgcttaacatgctgcttttgataaagccctcgatcttatcggaaatctcatggatagtcagagtgcagagatccagattgataaaaagcacagcattgcccttatgttccgtggcacagctggcgggaattgtgttttccagatagttgcagatggcattaagggtcagatttttctggtcgatcagtccggtctggatcaggatgcattgatacatatgggaagaaagccatcccacatttgtcagctgctgactgatttttacataatcagctccgggatcagtcagaatggacataaaaatctgatgcagaggaaaagctttatcccggctgtgcatgattcctgtagaaagtgcatgggataccatctgggaaaggtactccagaacaaaaccaaacgtatcatccaggggaacctcaccttcggaaaacatcagcctgtatactgctttatcattattggagatatttacgcaaagagaaggagcagtaaggccatttcccggataataaaaatatccggttttataaaaagcctcttcgtaatgaggatcctgcttcaggctgtccacaatagcccaggaattttcagtggaacccaaaacagaattggaaagatcacttagattccagtctctggaggcaatgatagtaaaatccataccgatcagcatcattggattgggaataatggaagctgtaagatccagaagctcctggatagatgcgttccggagacgggaatccatcagggactgattccactgatcatagaggataaaaatatcctgaatcctgttaaagacaatattgactggaatatcttcagggatgatacacatgtttggctgagttaattcgtagttctgatagatttttccaatcatcaggaacagaatatttttgggatgatgaaaagtgagctgaaaatccggatctgtgataaggtaaacacgtccatcctgaagaacggtgttcttttcaaagcaggaagggcaggaaagggtgggggatgtatccagcctggatgtatgcatggaaaatgatttctgcaggtgatagcatatgagttttgcactgagtttcaaggaaaatcctccttcctatattttgtaggaaaaaacaggaataatagccatattatgtggaattgtgattcttttgatttacagtataatagaatcataaggaaaaaacaagtgcagaaacaagccttttatgttggggtgtggcaaaacaagtgcggaaaaaaggctttcctgcataataacgtagaggaggtgcgtttatgttaacaaaaagacaaaatatgctggaagtgatccgcggaggaaatccggatcgttttgtaaaacagtatgagggactgacatttgttctgaatactccatatcagacgaagtatcctatgatgccggaaggacctggtgcaccaacagtaaaatgcggatggggatattataattcctggcctgcaggaacaccgggagcgtttccgctccatgatccggagcatctggtatgtccggacgtcgcagagtggaaaaaatatgtaaaggcaccggacatcaactacacggcagaggactggaaagaatgccaggagacagttgccggaattgaccggaatgaaaccatggttactgcaatggttgcacctggagtttttgagatgtgccattatctctgtgagatccagaataccatgatcaatttctacgaagagccggaagccatgcatgaactgatcgaatatattacagagtgggaactgaaatgggcagagcaggtctgcacctatatgaaaccggatgttgtcttccatcatgatgactggggaacacagaagtctacatttatcagtgtggatatgttccgtgagttctttatggattcttacaaacgtatttacggatattaccatgatcatggtgttgaactgatcatccaccataatgacagctacagtgcaacactggttccgacaatgatcgagatgggaattgatgtatggcagggctgtatgtctgttaatgatcttccgaagctgatcaaagaatatggaaaagatatcacatttatgggtggtatcgataacggtaaagtagatcgctttgattggaatcaggaaatgatcgaagagtcaacagatcagctttgcagagactgtggtaagctttattttattccgtgcaccactcatggcctgaatttctcatgtatcccaggtgtatatgaggcagtggataaggaaatcgataaaatgacaaaggaaatgttttgatcgaagcataagacttattaataagaagtaaatagaataacaaaggtcggaaaagcctgcaaaacccagcagaaaagtgcttttccggcctttttttgtgaaattcaggaaaaaataaaattgtaaagcaaagacccttgacaggtgtgccggaatcgtgtatgatagccaaggtgattacagatggagaaatttgtagagcagacatttttatttgatttttatggagagcttctgacagagaggcagcggcaggtgtacaccagtgtggtatttgaggattattccttaagtgaggttgctgaggaacttggcatcagcagacagggtgtgcatgatatgatcagacggtgcaatcggacgttggaagaatatgaagagaagcttcatctggtcgagaaattcctgaacatccgcagtcaggtcataaagatccatgaactggctgacaagtaccacgccgaagatattgcggcgatttccaatgtgatattagaggagttatgatcaatggcatttgagagtttaacagataaactgcagaatgtatttaagaagctgaagggcaagggccgtctcacagaggctgatgtcaaggtagcactgaaggaagttaagatggcgcttctggaagcggatgttaactttaaggtcgttaagcagtttacgaaatccgttcaggaaaaggctatcggacaggatgttatgaatggtctgaatccgggacagatggtgatcaagatcgtaaatgatgagctggtcaacctgatgggaagtgagacaacagagcttccgatcaaaccgggaatggatcttaccgttcttatgatggtcggtcttcagggtgcaggtaagacaacgacggttgccaagctggcaggcaaactgaaatccaagggaaagaaaccactgcttgtggcctgtgatgtttaccgtccggcagcgatcacacagttgcaggtaaacggtgagaaacagggcgtcgaggtcttttccatgggagataagcagaatcccgtggatattgcaaaagcagctatcgagcatgcgaaatccaatcagcagaatgttgtgctcatcgatacagcaggacgtcttcacattgatgaggatatgatgcaggagcttgaggatatcaaagcgaatgtgaatgtagatgctacagtgcttgtagttgatgccatgacaggacaggatgcagtaaatgtggcgcagaacttttctgataaagtcggcattgatggtgtgatcctgactaagatggacggtgatacacgaggcggcgctgcgctttccattaaagccgtgaccggcaaaccgatcttctatgttggtatgggagagaagctttcagatctggaacagttttatccagaacgtatggcttccaggatccttggaatgggcgatgtaatgagtctgatcgagaaggtggaagcatctgtggatcaggaacaggctcaggagatgcaaaagaagctgaagaaaatggacttcgacttcaatgattatcttaccagcatggagcagatgaacaagatgggtggtatttccagtatcctgaacatgcttcccggaatgggcggtaagatgaaggatatcgagggtatgatcgatgagaaggctatggaccgtaccaagtccatcattctttccatgacacctcaggagagaagtaaccccaacattttgaacatctcacgcaagaaccgtatcgccagaggcgccggagtggatattacagaagtaaatcgtcttgtgaagcagtttgagcagagcaagaagatgatgaaacagatgccgggattaacaggcggcaagatgaatatgggaaaaagaggcggctttaagcttcccttttaataaataacaataaattttcagaaagataattggaggaaaacaaaaatggcagttaagatcagattaagaagaatgggacagaagaaagcacctttctatagaatcgtagtagcagattctcgctgcaaacgtgacggaagatgcatcgcagagatcggaacatatgatccgaaccttgacccaagcgtatacaaaatcgatgaagaggcagcaaaaaaatggcttgcagctggtgctcagcctacagaggtagttgctaagcttcttaaacttgccggaatcgagaaataatacctgacagatttggatctgtggcctcaatgaggtaggagcaaggaggtatgtaatgaaacaacttgtagaagtaattgcaaaatctcttgttgaaaatccggatgaagtagtcgttactgagactgaaaaagacgacgcgattgttgttgaactgaaggtcggaccggccgatatgggtaaggttatcggaagacagggcagaattgccaaggcaatccgtactgttgtgaaagcggcttcttcaaaaagcagcaaaaaagtgattgtagatattctgcaatgaaaaagagacaggagctgtggattccatggctcctgtttttactctgaaagggagcaaaaatggaagatttattaaaggtaggagttattacaacgacccatggcgtccgtggtgaagtaaaagtttttccgacaacggatgacgcagagcgttttcttgatattgaatatgtgcttctggatacaggaaaagagcttcgcagactgaatattcagaatgtaaagttttttaaaaaccttgcgatcctgaagtttgaaggcattgacaacatcaatgatattgaaatgtacaagggccgtgagctttggatcccacgtgaagaggcacaggagcttggcgaggacgaatattatgtagcggatcttatcggaatggatgtacttctggagaatggggagaaattcggagtgctccgtgatgtgatggagaccggcgccaatgatgtttatattgtagatcgtgtggatggcgaggaaatcctgcttcctgcgatccatgactgtgttcttgatgtggatgtggaaaaaaataccatgactgtacatttgatgaaagggcttgtttaaatgaattatcatgtacttacattatttccggaaatgatcgagaacggaatgaacacaagtattacaggccgtgccattacaaagggactgttatcactggaagcgatcaatatacgggattttgcattcaataagcaccagaaggtagatgattatccttatggcggtggagccggaatgctgatgcaggcggagccggtatatctgtcttatgaatccattgcagaacgtattggaaggaaaccccgcgtgatctttctgactcctcagggaaaaaccttcaatcaggatatggcaaaagagtttgccctggaagaagacctggttttcctctgtggtcattatgagggaattgatgagcgtgttctggaagaaatcgtaacagactatgtttccattggtgattatgtacttaccggtggagaacttccggctatggtcatgatggattctatttccagaatggtaccaggtgttctgaataatcaggaatccggtgagacggaatccttttccgggaatcttctggagtatccccagtacagccgcccggaggaatggcatggcaaaaaggttccggaggtgctgctttccggacaccatgccaatgtggataaatggagaagagagcagtctatcatccgtacagccaaatggaggccggatcttttaccaaaagctgatctgaccaacaaagagtggaacgaggtccgcaggcttcgcaaacagtggaaagaggaagtggaaaaataattatgaaaacatcagatttttattatgatctgccgcaggaactgatcgctcaggatccgctggaggacagaagttcttccagactgatgcatctgtccctgaaagatggaagtatcgaacatcgtcattttaccgatatactggattacctgcataagggagactgtcttgtgatcaatgataccaaggttatcccggcacgtctttatggtcacaaggaagaaactggagcgctgatcgagatcctgcttctaaaacgccgcgaaaatgatatctgggagtgtcttgtaaagccgggaaaaaaagcacgtcccggtgcaaagatcacttttggtgacggtatcctgaagggtgagatcattgatattgtagatgagggaaaccgtctgattcagttccattatgaggggattttcgaagagatcctggatcagctgggagaaatgccgctgccgccgtatattacccacaagctgaaggataagaaccgttatcagactgtatatgcaaagaatgagggatctgctgccgcacctaccgcaggacttcacttcacgccggagcttcttgagaaagtaaaggagaagtgtgtgaatattgcacatgtaactttacatgtaggtctcggaaccttccgcccggtaaaggtagatgatgtagaaaagcaccacatgcactcggagttttatattgtggaagaagatcaggcaaaactgatcaatgatacaaagaaaaacggcggaagagtgatttctgtgggaactaccagctgccgtaccctggagtccgcagctggagaggatggaatcgtgaaggccggaagcggatggacagagatctttatctatcctggatataaattcaaagctatcgatggactgatcaccaatttccatctgccggagtctacgcttctgatgttagtttcagcccttgccggaaaagaacatattatggctgcttatgaggaagcagtacgggagagatatcgtttcttcagctttggcgatgctatgatgattgtgtagcctccaaatctaacaaatgtgaggttatcccagaaatcaggaaaaagtaaataatgggacaaagagaaacccaggagtgtaaatgctcctgggtgtttttgcatcaagaatccttataagtgaatgtatgggacagcccattgcggaacacaaccgtttccggacgcccgtctctcaggatgatagaatccagaattgagacaaagaagtttttcaggatctccggatccagtgattcagccagattttcatagtagatgtactgtttatctgccaacttctgcgtcaggatgaaggaagatgcctggcggataaattcttcatcgttcatggtacgcatccatggttcctgagacatcatgccaatagcctcgttgatctcctggagccgatctgtgatctgttgcttccggacaaggtactcacgttcagatatagaatcatcgctgtagaggtacagatcattcagacgatccagagcacgttgctgtttcttctgatctgccatcatgcgttttagctccggatccatcttaggttttgatcgtggacgcttcaagagtaccggatcacttccggaacatttctccagcatattgagaagagacgccaacccgtcaggatctacatgatcgacattagaaaaagtgctgccatgtagcaagcgcttctggagatcatccgtggaatggatgtaagcaaactgcttctgagcattcaggatattcaggatgtagttcagaaggaactcgcccaggacaacatccgaagtatattttgcatggcaagttttcgttttccggacattcgggcatccatattttgacggacgatatccggagacgtggagtttacctggagaagcagtgaaagcggatccgcactctgcacaccagacaagcccagaaaatacgtggacattcttctgagctgtttttcttcctggggtattccgataccgggcattcttatcaagggtagcctggatccgatcgaaccgatccggatcaatggaagccgggtggtggttttctacgataacccattctgattcgtccttaatggctttccttcctgggatcttgtaatagttgtaccgatacacgcctttataccacggattccgtaaaatagtccacactgccactgggctccacatatttccgtttctggaacgatatccagcctcattcagtctcctggaagtatgtacaatggattgtgtatcttcataggtttctaccatgaagttgtagattttgttttcctccggatctatggagaatacctgagtaggcttatcataagagtaaccgaacggaatacgcccgccattccatacaccattagaggcacggttaatcatggttgctgttacacgttctgaggtcatgttacgctcaagctctgcaaatactaggatgatcttcaacatggcttctccgatagctgtactggtatcaaattgctcgtttttagacacgaacgtgacaccaagatccttcaattctgcatacatattcgcaaagtccagaaggttcctggagattcggtcgatcttccagaccagtaagtgagtaaaaagaccttgccggatctgggacatcattttctgatatgccggacggtcggtattctttccggaatatccggcatcctcaaaaatcacaaagtcatctgtattcaggatatacttgcagtaagaagtgagatcctgtttcatcattggcaatgaatctttatctatctggtagaccgtggaaacacggacgtaaatcgccacccggataggcgtttctgagcccgatccgggcatcttaaagtttttcttcataattcctccatcaaaaagaaatagcccctccacggggctatacttagttcacatacggcatgtatttattcagtgccgcccatactacatttttgtcatcacggcttgcgacctggtaacaagccagtagccgttgcaattcttggacttgctcctggcgttctttttcttcctgagtttcagtgctgctcataagtacacctccagatattttatttacagttgttctgagatcctgaaaagataccggatccgaaagctctcttatcctggaaagagaaacagtttttgcgtgtccgaaagaggcgttaatatcactggtaagaactggataaaattcccaattatcagtatttgttactggaagatcacagagaaagcagaaaatgtacatgtccgaacatcgttccttttcactccaagaatctccggtaatatgatggtgtctatctgcaatatcaaaaacaatccgtttgttttcagaaatggcaccactttctggatgcttgcatgtgatcttagctgatgattttatctcaaaagaaaaagagcctgatacaagatcacattttccccagtggctacgccgctgctctataccaagagctttcatcacaaggaactccgctaaggcaccacgtacagaagaatcaatagagtacgatgcgtaccattcccagaagtcaacagtagaaaacccagaaggggaaccaagggtgcgaaagtccaaccagcggtccatattttcagtatgcagcttatcggataataaattggatatattaccgatgcggtttttctttgaatccatttttatcttcctcgctatgtattaagtgtcatggtaatgatttcttcgccatgtaaaatatggtaatgatattatccccttttacggtctgcgtacttttctggaataaccatatgggtacggagaaagtctttgcacattttctgcttatcatctggaatatgagtgataatgtcgatccattcaggatccagacaggaaacctcagtataaagctttctcccgtataccagataatccagagatacgtccaaatgctccgcaagctgcatgacagtatcaatctttggaatggatccctctttccattttccggtgcttccggtactcatatgtaattcttttaaaacagtagtcactgtagtgcctttttctgcacaaacagctctcagattatcgtagaacataaaatcctcctaaaaataaactcactaaaagagtgtttatggcattgacaaactcactacagtgagctatactaacaaacataaacaacaaaacataatcaatttaataattgaaaaagcacttctatcataccaacaaatgttaggtaagtaaagaaggaaaaggagggaactcatggaaaaaaagctgtctgcgtggtgcaaaaacgccaagatcgaaatgattaaccgtgatcttaaaaccacgacattagctaaggagctggatatgaaccgaagctatgtcagttcgatcttgaacgggcgtgtctacagtgctccggcagtcaaaaagatttctgattacctggggatcgctgacagtgacaccacaactgtatcggctatgcttgcgattgcggcgatcatgcagatcggaggatgcaagctggcatatgccgagagaggatataaggcgatcgggagtgaaagactgattttcccggtagtgctctttcttgaatataaggctttctgcgagccgggagaatccttctacgaagatgaagaggaggagtacgatgtttgatattacagcagaaacaaagaaagtccgtgaggacatggaaaagcaaggatatgtgctgaccgaggaagagtatcagatcattctggagtacacgatcagaaagagtgatcggtgcggaaagggcagggattatgtaccgctgcttctggaggatgaaattaagaactactactttcgcaacacggtaacagccatctcacttataaatatggcagtagcctaaaggaggaaaacatgggacagatgacagcagatcagtacctggatcagatccagaaccagttaatgaaaaccctgactgagaaaaaagacgctatgccgcctggattcaatcagcaaagattcgctctgaactgtatcacagtgatccgggacatgatgaaggattacaagaaaagagaacagctccagacagttgatatcaattcaatcgtgctctgtatgataaaaggagcgtacctggggttagatttcctgaacggggagtgctatgcgatcccgtataagggcgaaatgacattccagaccgactacaaaggcgaaattaaggtttgcaagcggttcagtgatgatcctatcaaagatatttatgcaaaagtagtccgtgaaggagatgtctacgatgaaggagtggaggcaggcgttcagaagttgagctttaagccagttccattctcaaacaaagatatcatcggagcgtttgcagtagtcatgtatgcggatggaaccatcaaatacgacagcatgagcgtggaagagatcagacatacaaaagacgtctattcaaaagctgcgaatagccaggcatggaaagaatcatttggagaaatgtgcaagaaaacagtcatccgcaggctgagcaaactgattgatctgaatctggataaagtggagctgattaaggcttatgaagagggatccggatttgagtttgagaatcagcagatctccggaggatccaccagacagccagcacagcttccaggatcggacaatgtggttgatgcctttgcaccagggcagacagccggacagaaaacgattgaacagaagccgcagccggcagtaacaccgcaggacttccgaaaagcaccagagagagaaccgatcccggcagaagaagtaccacagagcatgccggatgaaggctttatgatgccggaggattttccggataacgagttaccattcaagtaagcaaatggaggatatgggaatgaatgaattacaagtaaaagtacagcagacaccaggaacagtaacatggaattatgaagatctgaaaaaggcgatcacgaacgctctggaagtatacaagaccacggagtacgatgattcaaacatcggccaggcaaagaaagacagagcaatgttaaacaatctttccaagtctgtaaacgccagaaagatcgagatcaagaaaaagtgtttggaaccatatgagctgattgaaacccaggcaaaagagctgatggcgattatccaggaaccgattgcagttattgatgaacgcctgacagaatatgaaactgccagaagaaaaaaagcaagagctgtgatcctggaatatatgcagaaagcatttgaagggatcgaacagcagattgcagataaagccaagaacgctctttatgatgaccgctgggaaaatgcgacagctaagaaatcagaatggcagactgccattgatgccagggcggatgcaatcaggtcagatctgcaggttttggctggcatcgaggagaaattcagatcttacgccatggatgcgtacagaccgaacctgagacttgcggatgcaatgcagaaagtccaggaactgagagcacaggaagcagccatcctgaaaagacagcaggaagaggaagagagaaagagacgtgaggaagaggaacgccgcagacgtcaggaggagcttgcaaaacgtgaagcggaacttgcggctcagaatcagcaggaggaggttgctcagacatccggatatccggaaagaccgcaaacggacatcggaaggacgattgacaacatcgaaagagaggcatttgccagtgcgacagcatcagctccgatccagacaccaatcattgagccagcaccggagcccgttcaggagccggagattccttttgatccgaagccaagccagacggttagaatcacgggatccccggaggattaccagaaggtaattgagtacattaaggcaatgggaattgactacgaggaggtataattcatgggctttcagctaacatcggagaattattactccgacatagccaattatgagtacatgtcagtttcccagttcaaagattttgccggaacatacggcaaactgggatgtgaagagtgtgcgatggctaagattcgtgggaaatataaagaaccggatcgaacagcactcctggaaggaagctacgtggattccttctatgagggtactctggataaattcaaagaagaacatgcagagttgttcagacaggacggagaattaaaagcaaatttcataaaggcagaaaaggcgattgcaagaagtttgagagatccgcttttccaggaatacatgtctggagaaaaacaggtcataatgaccggagagctgtttggatccaagtggaagatcaaaatggacagctaccatccgggcagagcgattgtggatctgaaatacatgcagtcactcacaaagttcggatatgttccggacatcgggtatctggattttgtccgttactggggatatgacctccagggagctatttaccaggagatcgtttaccagaacaccggaaagagattgccgttctacattgccggaatttccaaagaagaggcaatgaacatcgaagtgatctacatacatgacaactacctgaaagaggcgatgaaggtaatagaaagccggatgccgaggatcctacaagtgaaatatcacggagcgaaacctgaccgatgcgagcagtgcatctggtgtagagacaccaaggtgctgacaaagccgatcgggatcggggatctgacagcgagtttatagtatggaggtgcaggagatggcatggatcacggtggatcagaagctgatcggaggtaaattaagggattttgctaagagatccggaatcagccagaatgaggcaatcgggatcctgattcgcctctggctgtggggaattgacaatgcggaagagagcggacggattgtagctgccgaacatgaggacatcgaggaagcgatccgtccgggattcctggagattgaccggagtacaatttcaaatatcgttgacaatttgattgagtgtggatggatcgaccaggaggatggttccttatatctgcatgattggatggactggagaagttattatacgtcatatgagcagaagaaagcaaaacatgcggaacggatgcgagattatagagccggaaagaaaaaaagccaggatccggaaccggagaaaaagccggagggatccggaaagacgaagcgtaatgagtatgcagtagcttttgaggagttctggaaggtctatccgagaaaagtggataaaggaaacgcttataagaagtaccaggcaagattgaatgacggatattcggatgcggagttgctgacagctgcaaccaattatgcgaaccagtgccagagagacaagacagagacaaagttcataaagcatccaaagacgttcctgagcgatacaatgccatttacggacttcctggataatagaacccaggagccagcgaaaacgttcaggaaaggcgaaaatccgttcatgtagacagaaggaggataactggaaatggaagttggaggcatgttgcccttttataggcaggaagagataagcccaatcaaagagggagattacgttggagaagatggtctgatccgatgcggagtatgcggcaaacggaaacagttcaaaattgagatctcaggattcaagaagattgtgccttgcatttgcaagtgcagagctgacgagatcgaaaaggaaaagcagaaagatgaatacgaacagcggatgcacgctattaaccgcctgaaagatgcttccatccggagtaaagatggtgggtacgtgttgtacgggaaagggaacagatcacagcttgacgtagcgatccggagatctgtattaaccggactgaatcagacagccggaaaactgacagagttatacgctgaggacatggatgtggaatattacgaaaccacagcccatgccggagcaagaccttctcatgccgaatggcaagggagggtttttaagattcacggatcatctccggattatcccaatttcgtagattctaccgggtacggatcaggatccggactatgcggctggaactgccgacacagcttctatccatactggccaggaatatccagtccagcatactcaaaagagaggctggcagaatatgaccgggcgaaatactcatacaacggcgatatgctgacagattatgagtgttcacagatccagagagcgtatgaaagagagatccgagagatcaaacgtattctttccagctacgatgcagcaatgcaggaatcacgaagcgaagcacagatccagtgcatccaggaagattttacatcggagagcgtgaagctgaaaaagaaagagagggagttgaaaaacttctgcaatgacaccaaccggagctatgacagtgccagaacccaagtggtagcatacaaagatagtgaaggaaggattgtcaattttggaagatccacagctcaaaaggctgtatgggcgaataaaaaatcaaattaggaggtacatgtaacatgaagaaagaagatctgtttaagcagtgggaggagctgaaagcaaaggaagaggatattgattgcattatcctttatattcacatgccgactggcgaagaggaagtgatcgtcaatccgaatgtggttgataagatgcagtatataggcaagacgtacaatgatgatctgattcacgcaaactgcaaagatatttatatcacagacgttattttctccgtgaatgatgattcctgcatggactttgaagaggctcttgcgttgatgaaagagggacacaaggtaaaacttccttcctggggaggctactggagctgggatcaggaaaaagagacggttattatgcacacgaaagatggcgaagatctggatatcagagaaacacagagagttggctacactctggagaatattctttctgatgaatggcagattgctaacgaggagaattgtcctcagcttggtggagaggctacattctcttttggttttgcgatcaaatatctgaggagaggatttaaagttgcccgtaaagggtggaacgggaagaaacagtacatccaacttgccaccggtatttcctacaagacggcggatggagatatcgtgaattgcgaacatgatgccatcggtaatatggctatcgcattttgcggaacgtccggagttcaaatgggatggttagcatctcaggcagacatgctggctgatgactggatgtttgttgaggaggaaaacaacgacagttccaaatattagaaaggcggtgatcctgatatctcccacctatgggttaaatagaaggcggatataggcgatcagcggaagaatggagaaatactcacacaatggaataaaaggtgtgcatgaggctatacgaagctctcaggtatgctttacgcagagggattgtcaataaaaggcaatccttttgttttgccctggaggtatggcatataaactactcagttccccatcgtgccgggatataaatgcacgatagcagagccggagtgaaccggaatctaaatgaaatcagcgaagaaaggaaggtaagtgacaatggcttacgattttttgaagaaactttttaagaaggatgaaaacggagcaatcattcccatgactgccgaggaactggaggctgccattgatgcagataaaaacatcaaggtagtagatctttcatcaggtggttatatcgcaaaggataaattcgatgcgaaggaaacagagctcaagggagtgaaaaagcagttggacgatgccaacattcagatcaaatcttttgaggatcaggacgttgacggaatcaagaaaaaggtttctgagtgggaacagaagtataacaccgatactcaggcattgagagaccagatggcagctcagagcagatcccacgctgaggatatgttcctctctggatataagttcacatcaaaagccgcaagaaaaggcgtactggacgaactgagatccaagaaattccagttggatgacaacggaacattcctgggagcaaaagagttcatggattcccttatgggggacgaggactacaaaggtgcattcgtaaccgaaaacaaggatggaggtgctggatccggtgccgaaggtggcaacggaggatccggagcaggtgccggaggccagggcggaaatccaccgagattttctgctggagcaaacggaggaacaccagccggaggaaatcagaacccattcctgaacatgggctttaacagattaagacagcctaaagaaaattaaggaggataacagaatatggcagctttaaattatgctaaagaatatcagcaggcactggagcaggagttcccttatgtactctacttcggtgctctttttgcaacaccgaacaacggaagataccgctgggtaaactcaaacgtgattgagatcccgactatcactacaaccggacgtgtggacggagacagagacacaatcggtcagaagaaacgtaactacaacaatcgcattcaacattacaaaacacgcataatttgaaccatgtttgttatgggagagagccagaaatggctcttttcccgtagaaaggagaaataatgttaaaagcaagaaaagcaaacagagtattgaagatcccggacgaaaagaaaaaaacatatattgccctgggatatacgatcacagacatggacggtaatatgatccatgaacacgtagaaccttctgaaaagctggaacaggcagagaaagagatccaggatctgaaagaaaagctggaggaggcttccaagtatgctgaaaatgcagataagaagatcgaggatctggagaagaaaaacgctgaggcagagaaagagatccaggatctgaaatcccagattgcttctgcaggtgctacagaacaggcggcaacaccggctccagaaacaaagaaaactacaaaggcatcctctaaggctgagaaataagcctcagaggttctttcctgtttagacgggaaaatctacgggaggtgtattaaaaatgtctgacgaggctatacagaagccatacgttgactatgattactattccaaggactacagaggtacagaggcaagtaaaaccacttttgagcagaatctgaaatgggctacggctctgatagatacaataaccttcggacggatcaggagcctggaggttatccctgactgcgtaaaagatgcgatatgctgtgctgttgagaaatactccacataccaaaaactccggaaccaggaattgaagtctgagagcaacgatggatattcagtatcatacgctgatgccgggaaagaatcagatatgcgtcaggaagtgatcgctgacatgaagatctatctgtccggcactggcttaacgtacagagggaggtcaaggaagtatgattacaaaccaggacatcactatttttaaccttcgcctggacaaaaaaacccggagggaggtttttatccctaccaacatttcggaggtatcattcgtggatatgagatcttccggaggatcagcctcagaacgtgaagagaatctgcattttagaatcaggatcccagtaaatgccagagtgcaggattcacggacatacatctcagaggacaaatacaagctcctagacgatgaagaggctaagaaacattggacgttgcagaaaggctgttgcatcattaccggaaccattttctacaatggagaatggaagtttgatgattttgatttcagcagtagagttatcacatcgtcacggatccgggacttcctggatctttttaagtatgaccgtgatatcgttcatgttaccgagtatgcagacaacacccggaggggatccgatgccgtaaaacactggagggtaggtggtgcttagtggcttttaaagagatcacgacaccgaaaggcgttatcatccagggaaagaacgggaaagcagaactaaagtgggatccttcatttgttccaaaaacgaaccagaagtttacccggatgcagaaattcgttgattctgaggtgctgcggagatgcagtcccagagtaccttttcaaactggaacgttggaaaaatccggaaaactgggaaccacagtaggaagtggaattgtggagtatattgcaccatacgccagaaaacaatactgggacacttccgaaactagagcttatgatccgaatagaggagccaagtggtttgaacgaatgaaggtggctgagaaagccgagatcctggaaggtgcaaggaaaataggaggatagcatggctgattcaatcctggagggcattgtcgaacatattacggcatgccctcttttgcaagatggggtattccgtgtggatgccttgggggatcaggctgtggagtacacgatcgaaaccggaatctttgatcccgtgattaaacggtacatcaacggagatgaagtgagacagtatcaattcaattttggaagtagagagtattactctatggatcggatccagaatatccagaacagcgcattttatgagaaattcgcaaactggatcgaagatcagaaccgcaaagaagtctttccgaatcttccggaaaattgctatgcggagaagatagaggtgctttccaatgggtacatgcatgatggatccatgagaaacgccagataccagatacaattaagattgatttaccagaaggaggtagcacaagaatgtcaaaacgaacagcagtaatgcgtcacatgattgccgattacctgaatgtaggcactactgaaaaagcggagtatgcactcatgggaaccggatttactaccctggacgaaagcccaggagcacagacggaatctgtgaaatatgtcaacgagaagagttcttcttcttccgtgaccggatatgaaaccagcttcccgttcgaggcagaccatatccaggaggaaaaagccgttgacgctctttacatggttggaagaaaccattacaccggatccgatgcagagtttgagtatgtaagagttgaactttggaacaaaggaacaggtcagaacgaatttgaagcacgaaaattccttgtttcatgcgaggtatctgattattccggagagaataagcaggttgtcaaaggaaacctgaatgcagttggggatccgatcctcggtacattcaatgggtagaatagacacccataaaaagagagggggttaatgaatgccagtaaaagtaacgggcgtgtctttcgatggcgcccattcatataatgactggggattgaagctgaaaagcgtgtctatcggagttccgaaagcaaagacggtatacgttagtgtaaatggcatgaatggatccctggatctgacagaagctcaaaatggtggcgtagtgtatgaaatgcgaacactgaaatttacatttgacgccagagattgcagctacatccgctggactggactaatcagcagaattgcgagagcgatcgaggggaaggaaaggcggatcatcctggatgtcgattccggctattattataccggacggtgtcatattgacactaagaaaactaatgaggagcttgcggaaatcagtattgaatgtgcgtgcgatccttataagctggatgtcacatcttccaatgaaccgtggaaatgggacacgttcagctttatagatggagtgatccggaatacttcagacattgacatcaacagtctgacatcctggaaagagataatcctggacggatatccgtataacgatacgctgaaaattatttcaaacgcctcaatgaaagtaaaatacagaaacggaacgtatgatatatacgccggagaaaatatcatgtatgacattgaactttacgagggagagaataagctgtacttccaaggtaaaggaaaaataacaatcgttcacagaggaggtatgttgtaaatgtatacaattaaggcttttgtggatgggaaagagtacatgatccataacccacgggttaaggcactaatagtcggggatccctactaccagaagggagataatgtgaacgggcaggctgagttttcagtctacccgacacacccgtattaccagtacgtgaaaaaactcactactgacattgttttctacaaagatggagtagaaaaatttgctgggcgagttctctatgatgacgaagattccaagggtgttaagaaagtattcgtcgaaggagaacttgcctatttttgcgacagcattcagagaccgacagtgtatcataatatttcggtcaaaaattacctgaaaacagtaattgacaatcacaattctcaagttgaggagcgaaagcaattcacactgggacgtgtatcggttacggatccgaatgattccctatatcggtacgctaactgggaaactaccagagaaaccctaaaagataagctggtagacagactgggagggcatcttgtaatccggaaagaggacggcatccgctacctggattatctgaacgatgatgaattttatacccagaacagccaggagatcaggttcgggaagaatttacttgattattctaaaaacatggatgcttccgacctggtaacatgtgttatccctctgggggctaaattggaggaatccagcattgaaggtctcgaagagagactgacgatcaaagaagtgaacggaggcgttgattacgtctctgatgacagtgcagtggcagcctacggacggatctacaagactgttacgtgggatgatgtaaaagtggcatcgaacctgatgaaaaaaggacgggaatatctgaaaagtgtacagtttgagaatatggttcttgaattgaaagctattgatctgaatctgacggatgatgatattcaggagttcgaggtcggagatctgattcgttgtgtttctcctccgcatgggcttgattcaaaattgccattgtcaagcctgaaagtatatattagcaattttgctaagaataccattacattaggcacggaaaagcagagcaatacctacacgtcctcaaatagccatacagccgaggaaatagaaaagactataaattctataccgagcaaaggagaaatcctccaggaggcgttacgggacgctacgaacctattaaacgacatgaaccagacaggtaatgcgatccacaccaaaaatgagttcattgtctcagatactccaggagtagccaatgcaaagaacctctggagatggggactgggtggactggctcactacagtaatggatatgacggtccggctgacggagtagcactcacgatggatggaaagatcaacggaaagatggttatggcaaacagcatcgtggcggaatccatagatgcaggttaccgaacttccgtagagacgaagatctctgaaagtgaaacggctgcgaaagatcatgcagacaaatccgtaagagtagcccgtgaggagatagagaactccataaccaacatggagaacaaaatcgcactgtctgtaaggagtgtgaaagaaacagttgccagaaagaactacattgccggaggagagcaggaaacactcgatatcggcaaatttacgttgtctggagcaaccggaaattgcaagattgaaaaatcagagttccggaacacgaaagcattcaagctaacttttactggatccggatcagtaacactgacacaaagcctgggaatcctggaagctggaaaatacaagattgctgttgaagcagcatatccggaaggatcgaagtaccgaccttcctacatccagtatggattttcagagaacaaaaccacctcgtacctgagtggatataatccggatgaatttaatgcttttagcaaggaagtacagattaccagggcgtcaaaatctgtggcagtgacagtatacggatattccggatctgtgctgtacataacggacattcgctgtctcagggatatgcaagaacttctggatgacatagacgccaaactggaggtcgaagttgggaaagtagctgcatcggtcaaagaagtatataccaatgttcaacacgattactgccagaacggcagtttttctgattctgaggacgctttcaaaaactggtacagatcaaatacaacctacatcacgaaggttcaggatggatcgaagaactgggcgttgttggatcgagagacacagacatccagctattacctgagacaaattgtaaaagttccaaaagcaggcccatttacagtgagattcaaggcaaagtgcggagaaggtcagacatcacggatccggatctattttgccggaaccaataagtacacagatgccggaagcgtaacagaaacgtataaaacttttgagttggagttcgataatgtaactgccaattcttggtacttctatgtttacaactatacttccggaacaaaagtttatatcacggatattgagatcctggggtatatctcaggatattcggaaagccagcttcaagtgctgaaagattctatcgaatccgaggtgtcaagagctaccgccggagaagaaaaactttcttcgtcgatcaagcaaaacgccacagctattacctcaaaggtaagcaaaggagaaatgggatcttacatcacgcagtattacaacaacgtgattatagctttcaataaaaactcaaaatacgtgcagatcaacccaggagaaattgctatttacaattatggagtagagaactccaagaaacgtgctgtattcgatgaaacgggtaatcacttttacagagatgggtattatgtcggagcgatcggcacaaaccagtggtcagggaacaatgctcataagggattagtgttcgatttggaaccacaaggaaagtatatggcatttgctcaaaaagcaagttcctcagcaacttcctacactactatgttgtgttttagccgagcaaacagtatttacgatgaatatggagtgaatatgggatgcaatttgattggaaactggtatacattgaaaaatttcaaaattggaagcatatcagcaggaggatatacggcttttagcggagcgataccgattgtgtgcgaaataacaacagctgcactggaggttctgaaagaaaatcaggacttccagtacctaagaagtaaactcagcggagacctggacaaagaaaccagtcagtgcatgaacccagtacgctatgtcctgggaatggaagatgcgatccggagggacgatctggtggtaatgcgaagatgccaggatccggaatattacgtcaaatatttgagagaaagtcggaaaaagctggacgaaatcctaggatcgtcaattttggaaccgaagctccgggaaggacagctgacaatatgggattttataggaggacaatagtatgcacacagaaaatgagtatcacagaggagaaatcttttttatcaatgagggcgaaagctcaggaagcgaacaggggggggcgagacctggaatcatagtaagtaatgacgttggaaacaaacacgctccgatcgtggaagtagtgtacctgacatccagggagaaaaaactgatgccgacacacgttaggatcaagagcagtccgatcccttccatagcgttatgcgagcagatcgagacggtatataaaaagcggatcggaaaatatcttgcaaaagccacgatggatgaaatgaaacagattgacaaggcacttgctgtcagtatcggacttggtggaaatatgaagatgtccgactacgtgagagagtgggcggaggcgttcaaagagccggatccgatagaagaaaaagcgatgcagatcctggaaacagcgaaaccagttccgatccagataccggaaggcttttctgacaaagagaggatcaaggagttggagaaagacctgatccgagcggaagcggagcgtgatgtattccagaaactgtataaagagcagttagcaatcagttaaatgtgaggtagaggacatgagaagaatcaaacgtatgatttttaagcatttcaactgcattccctggttcatcgtgggaatacagatcctggtagacggagagatcagccgctggcagtatgcgatgtgctggatctgcaccctggtaatgatctggatgtatgcaccaaatagagcacaaacgaagggaggtgggaaagttgctgacattgacgatcgaaaaaaagtggtttgatatgatcctgagcggagaaaagacggaggagtaccgggaattgaaacggtactatgattccagattcagaaatgccgccatgctgaaaaaccaggaatatcaagcaagcgtttccgagttccggaacctggctgcaacagtggatcaggatattggaaccgtgaagtttcggaacggatatgctccggatgccccgtacttcctggcagactgcaaattgacagtcggagagggaaaaacggagtggggagctgttcctgggacagagtattatattctgaaaatgaaaaacgtgaggagtaaatagcatgattttcaagtacggagatccgctagggagaagaaaaaaagatcttttattcgacacaggttatagagctgctattgacgatatgcaggataacttaatccgaaatagcagaacagaaactatagacggtaggataaggcttatcgttacagaagatacaatagaaactgtatgcagagaaatgagaaagaggtgcaaatagtatgtattacgattacccggaagaggagttttacccagaaagtgagtatcaggaacagatagacgccctgaaagaagctattaaaaaatcggtaaaatcagagatcctggaagaaatgaatagattaagagaagaaaacgaaaagctccagggtatcaaggaacattttgaggaagtgaaaaaggattacgagaaaaagaaagacgagtgcgaccggattgctcgtaatgccgagtacaacgccaagaaaatgagacttgctgatcttatgaaggatcataaagtcataaaatggaaaattgcctgggagtatgtatatggtccgaaatgcgacaagtgcgactctgatcgagaggtagaggttaaattgccatcaggaaagactgtaaaagattcgtgcggatgtaagacggatagcaaaaggtattattacccaaaaagatatatattaagtgagtttaccgacaggcatggagatggaaggataacagctcattactccgaggaaaacagctacaacaagcaagacacgtattatgaactatacacttgtacagtatgtgacaactttacggatgctaagaaaaagaaagcgatagaaaatcttagtgatgaagtgagaagcatcttgtttaatgaggaagaggagtgccagaaggtatgcgacaagctcaatgaaggtcttggaaattttttatacaagaataatggagaaagtataaaagaatatctcaaaatggcaaaaggagaatagaggaggcagatgatgaatgaaagagaaaaagaggatcaggaacagttggaatacctgagagaatggaagaaaaaacactcagggaaagcaaaagaagaaagctcaattaaaagaatctgcaagaaaggtaggaaattatggacggaaaaatttttaagataagcggttacctggtggatccgaatggagaaaatgaagcagcctggatatgggaggaattgaggcatttgaatgacacgttcggacagcatgtacacgtcaaagaggctgatataccggactggacagatgaaaatccgctgaactatgaaaactgcgatctggcagagtgcgagaagtatttcccggataaatacccagtgagagaagatagaagtgtgaaggttgggaaaacctacagacatttcaaagggaaaattgtggaagtgatagcaatcagccaggacacagaatctccaggacaattctacgtggtttataagtgcgaggatggagctatctggagcagaccttatggaatgtttatcagcaaagttgaccaggagaaatatccggatgcagaccaggagtacagattcgaggaggtgtaggatgcagagcttcagtaaacgcttaaaagacatcatggaaagccgtggagtgctgcaagccgatcttgcaaaaaagaccgagatcacggaaacaacaatctccaggtattgcaatggaaaaaggatcccgaatatagaagcacttgtcaaaatagcaaaagcattggacgttcctacggatcttttggtagacctggagtggaatgaatacaatacgataggagcactacagaaaaacctcagagaagcaaaagaaaagctgggagaggcattgttggagaataaagttctgcatgagtacaattacaatggatcttccggtatctgccgggcaaaacttatgggatctatgaccggagcatggcacattggaaacgtagtatgcgtggaaaacggtagatcattcatgttgacgcaggatgacttttcggaggaaaacgggtatcttattctccgggcgatggaagtgatcccagaaacgatccagagattcgcttgtgtggaagatatgaccggagaaaggctgtttgagggtgatgtgatctacaatccggagcatagaacagtccgaatggagatctgctacggcaaatacgccgcatattgcccgaacgatcaggaatatatggaaactgtcggcttttatatggtgtcgaacaccacagacgatgcaatgccgctcggtccgacaaaggaatacgcacttttgttgggaaatgtggtagacaacccggagatcaaggtggtataatctcagtcaggatgcaccggaaaggaaagggaagaaaatgagtaaaagaattttagcagcaattttatcttgtatgttggttgtcggaatgaccggatgcggtttttccgatggagtgaaggatggtatgaaggatgctcagaaacaggaaagcgtgactgattccgagaaaaatgatagcaaaaaggatgaaaacgtgaccgaaacggctaaaaacgataccgaaagccaggaaaacgtttcagaatcagaaaaaagcgagaccgggaacccacttctggatgcagaggtaaccgtaggcgatgtaatgaacggaaccaagacagacaagctgggcgaatatgcctatatcacagtgcctctggagacaatgaagaaagtcacaatggagcagtacgatgaattttgcgatcagaaagtccaggacagcggctacaactgggttacgatcgacttcggtaacggatccggattgcagttccagggaagcacaccagcagtagcaacctacggtacactggataatgaggaatgcatcgaggaatcaaaaggaaccgtaatgatgactggagagaacacatatgagtattccgagaaccagtaaaacaccaacaaatgttagaaatggtggtgcacccgtaatcatacgggatgccatgatgatcgaataagatacaaaattactctttatattataatatcccaacggatcgcagcatagaaacatgcagtgcaggatctgttgggatattatttttgttatgctatttattcttcactgtcagagctttccgatgtagcggatgaagaatccgcagcaggaatcgcagcactgcgttcctctatcttggatttgatcctggaagcttcatctccggatgcaggagttggctggtagttgttgtagccatctgcggaagaaatagagcagggaatgacattggtcacgttatcagcctgtacgccttctgaggtgacagtgaaggtctgctggaagatcatggtgtccatatcacttggagaactgtttcctccaaaacagaaattgccaagactgtagacgatgttttttcctttataggtttcgattccctggagtacatgcggatgatggccacataccagatctgcaccttcatcgatagcaagacggccaagggtcatctgattggtatcaggaactgtttcagtctcattgccccagtggaagatcacaactataagctctgctccatctgctttgacctttgcgatattatctttcagctgctgttcgcgttcaagatgatccttcagttcataaattccgacaagaccaactttgattcccttgatgtccataactgcagtatcatcataaccgaagtgtgtaatgcctgcattatccagagcagtcagagtatccgtgtagctctgctctccgtaatcatggctgtgattgtttgcagtgtttacggcttcaacggaaccgctggtgagtatctgagcatattcggcaggtgctttaaatgcaaaggttttatcttctctggcatcggaatcggtgagggttccttcaaaattggcaattgtcaggtcatctgcctcaaagatgctttttacattcttaaagaaataatctttgccgttgttatcgtagcatgcgttcagacttgtgtcataatcaaaggtctcatcggtacccaacgtgcagtccccgactacgctgagcgtcagtgaaacgggatctttcacagcagcagcttcttcttttgccttttttgcggcctcctcttcctgtgccttctgcaaagcggcggcttctgcagctttccgggaagaaatgcatgcacgtgcggaaaaaatgatcacaagaacaagtatgatcaggatcccgccagctgcaagaaacattttctgacggcgtacctggtaatatctggattttttgctgatgtcattcctgcgagtcccagtggaatgtgaacgggaattacgggatgcagaaccagaatgcttccgccgtgcttcctgtgctctggcggcttctctgcgtgcctgctccggatcatggccatgaggcggccgcctttgattgtcgtttgccattctttttctccttcatatgtaaagatatctttattatagaaagaatggtaagtattgtaaagaaagaatcgcggacttttcagaaaaagaagtttttgatataataattaggccaaaaggcagaaatataaactacagggagatgttgctgatatggtattatatatcggaaatcatacaagttcgtccaaaggctatgctgccatggggcgtcagatgctgaaaaacggcggaaatacgttcgctttttttacccgcaaccccagaggcggcaaggcaaaagagatcgatcccgcagatgtggaaagatttctggagctttccggggaaaatcattttggaaagctggtggcccatgcaccgtatactatgaatgcctgtgccgcaaaagaaaatctgcgagattttgcaagagagattatggcagatgatctgaaacgtatggaatatacaccgggaaattattataattttcacccgggcagtcatgtaggacagggaactgagacgggaattgccaaaatcgcggaaatcctcaatgatgtccttacagaagaacagagtacgaccgtccttctggaaactatgtctggcaagggttcagaagtaggagcaacgtttcaggagcttcgtgatatcattgacagggtggaaaaaaataataaactgggtgtctgcctggatacctgtcatgtatgggatggcggttatgatattgtccatgatctggatggtgttcttgatgagtttgaccgggtgatcggcctttccagattgaaggctgttcatcttaacgacagtataaacggactgggcagtcataaggatcgtcatgcaaagatcggcgaaggtcagatcggcctggatgcacttgtgaatgtggtgtgccatccggctcttgagggaattccctttattctggagacaccaaatgatgatgaaggatggaaaagagaaattgcacttttacgagaacgatatttcatgaaaggagattgatccatgaaaaagttcagatattttatcctggtgcttgccggggtggcagcgatgatgctgggaggatgcaaagataaggaaaaatacgacgaatctgcttttcaggatgacctggaacctctgagtgaggatgaagtggaggccatggaccagaatggtgacgatgagatggcagtagctgatgaaagtgacctggagcagctgcaggattctgaaaatgctgcaggatcaggagacacagatgggtccgcttcatcggatgcagcagactcacagagcgaaaagaaactggatgaaaatggcacctatacagataaagatgaagtggcccagtacatttatgagtatggccatgtaccttccaatctgactgctgcagactatgataatgcagacagtatgcttccggtagaggatggcgtcacctatcagcagtgcagccttgatgatgcagggaaacagaagctgatcttcactcaggatgcaaagcgcatttattacacagacgatgacggacagtcttttgacgagatctattaaaatcaaaagaacaaaataagacccccggatacagataaacgatcagtatccgggggattttgcatgtcaggtctgagactgatcagtggaccagatttttcatttcagctccatccataaaagtttttgcgttttccagggttgtctccgcaatattggtcagtgcttctaccgtaaagaatccctgatgtgaggtcatggtcacatttgggaaggacagaagacgctggatcgtggaagtaggaagaatgctgcttgacatgtcttcatatacatatgcggattcttcttcgtaaacatccagaccaacggcgaagaatttgtgatcacggatacctgcgatcaaatcatcggttttgatcagtccacctctggaggtatttacaaggatcacaccatctttcatttttgcaatcgtttcggagttgatcagatgctctgtttccggagtcatcggacagtgcagactgatcagatcactggtggaaagaagttcatccagtgaaacatactccagaaagtcaagatttttattagggaaaagatcataagcaattaccttcatgccaaagccgcgacagatttttgccattgcctgaccgatttttccggtgccgatgatgccggcagttttctgataaaagttaacgcccatgagaccgttcagtgcaaagttattttcacggcatttgatatatgccttgtgggtgtgccggttggcggtaagtgccagtgccatggcgtgttcggcaactgcttccggagaataaccgggaacacgtgccacctggatcccgcattttgctgtagtttccagatcaacattattgtatccggcacagcgcatcaggatcagttttacaccctggcggtgaagctcttcaatgaccggtgcgccaaggtctgcatttacaaatgcacagatggcatcgtagccgtgggcaagagctgcggtttcttcatggatatttgcttcaatgaatttaacttcaataccaggataggacggaagcagcttctcaaaaaattctctatcgtagctcttggtgtcataaaacaaaattttcataattgttgctcctctctggaaataattattttccgaaaaaataataccataatagtaggaatttggaaagtggggaaagcgataaaatttatcaaaaaaatggttttgttttggaattatgatatccataataaataaaaattatacgaaatacaaaaaaaagagagcattttatgcactgtcatctgatggaacagatgttgtgatacatgaaaatgctctctgtctggatatgagataattattcagccagactataaagatcagaatagaattccggataggagatgttgacacattctccatttttgatggaaagtgttctttcacaaagcagtcctgctactgcaaaagacatggctacacggtgatccagatgagaatcgatctctgcgccatgaagggcttttccaccatgaatgatcatgccatcttcggtttcctggatctctgcgcccattttccgaagattttccgtcataacctggatgcggtcggactctttgacacgaagctcctgtgcatcccggataacagtggttccttctgcaaaagctgccataacggcgatcatcggaagttcatcgatcagagtaggaatgatcgcgccttctattgtggtcccgtgaagcgcagaggagcggatcagaagatcggcagtaggttcgccctctgtggtttcattgagaagagtgatatctgctcccatggccctgcatacacggaggatgccgtcacgggtcgggttgatccccacatttttcagaaggatctcactgttgggaacaagaagacctgctgcgataaaataagctgcagaagagatatctcccggaaccaggatctcacgtccgtaaagagatgggtccggtttgatagatgctgttgttccctctgcggttacattggcaccaaagtaattcagcatgatctccgtgtgatttctggaaaggaccggttctgttacacgggtaatgccgtcagagtacattccggcaagaagtacgcaggattttacctgggcagatgctaccggagaattgtagtggatggcatggagcttttttccggagatcttaagcggtgcacatccgtttccgttgagacttatgatatcggcacccatttgggaaagcggagtcatgatccgtttcatagggcgtttctggatggaagcatcgccggtaagctctgatacaaagtcctgtcctgcaaggatcccggagatgaggcgggtggtggtaccgctgttaccgacgtcaagagtctctgacggagcactgagaccatggagaccttttccgtggaccaggatctctccttctgtattttcaatgttaatacccattttccggaaacaggaaatagtggagagacagtctgcaccctccagaaaatttgtgattttggtagtgccttctgcaagagagccgaacatgacagctctgtgagaaatggatttatctccgggaatggcaagagagccggataatttttttgcttttttgatttccatattagtacctgcctgtattgttatttttgaaatacatggcagcagatcggatatctgctgccgtttatatatcagcgttcgcagatcttgtaattacgttttgtaagaagcactttagcctgctccagagctgcgtctgtataaaattcgatcttcagaacgccatcttcaaattctcggttgtggataataccgatatttttgatgctgaccttttctgttgcaaggatggttgcgatggttgcaatggcaccggcctcatctgccacatcgatataaaggacataggagcgggggatcaggctgttgtctacaatgtcaatggagtcacggtaatccttggagcttgcaaacatgtcaaagatgttgtcagcttctttgttgtcaatggaacagcggatctggatcagcatacggataaattcatccagaaccgtggaaatgtttttctgattttccagacagatctgttcccacataaccggtgaagaagaggcaatacgtgtgatatcacggaaaccgccggctgcgatcattttcatatactgggcgtcgttatccagaagatttacaagatttacaagagcggaggctacgatatgaggaaggtggctgactcctgccgtgatgaaatcatgttcttctgcagtgataacaagggggatcgcaccaagagaggagatcagttctgtgaaatcagaaatcttttccaaagcaacttctcctcccggagtgatgatataataagcattttccagaagatgatcactggaattggaaaaaccgctgcgttcggagcctgccataggatgaccgccgatgaagcgtccttcaagtccgagctcggttactttttcgtggataacactttttacactgcctacatctgtgaggatacagttctttccaagagaatctttgatcttttccatgtattccacattaaattctacaggtgcacagagaaaaagataatcacagttatataactgctcatcgtcaatatcacagatcccgttgatcacgtttaaactgactgcctctgccagagcacttctgtctttgtcaaaggcaagcaggcgataatccgggtgaaattttcggatggttctggcaatggagccgccgatcagtccaaggccgataaaacctatggttttcatagtacttcagagtcctttcaggttactttttacttttattctttaatagtgtaaatcacgactatattgtaaaagaaagtgtgaaaaatgtcaacaaatgttagcggaaacaggaaggccatttttgtagctgtttaccggtaatgttttgcgaacagggaagagtaatagaaagttactgttcattggtaatattccgcgaggtgttttttgtgagcgaaggtcacggaaaacccgagacataccgcgcgaatttatgtgatcagcataaattctgtgcatcgcgaagcgtgttgctgagaacggagtgaacagtaacaatagaaaaaggcttgagaaatcggagatttcggacgtataatataataagaaaaaaacaatataagatacagaggagaatttatcatgaaatatcagtcagttatggatcttcacacacataccgtagccagcggacatgcatactgcacacttcgcgagatggccagggctgcttccgataaaggtcttgaactcctgggaatcacagagcatgcaccgaaaatgcccggaacctgtcataagttttatttccagaatataaaggtagtaccccgtgaaatgtacgggatccagctgcttctgggttcggaggtaaatatcctggatgcggcgggaacggtagatcttgagcagaaaaccctggagaagctggacgtggtcattgcaagtcttcatgttccatgcatcagaccaggcagcagacaggagaatacggaggcctatcttaatgctatgaagaatccgtgtgtcaatatcatcggacatccggatgacggaagatacgaggttgactatgaggcgcttgtacagggcgccagagaatacggtaaagtcctggagctgaacaatcactccatggaccctgactgtaaccgtgagaatgcagtagagaatgataccatcatgctggaatactgcaaaaaatatcgggtacctgtggttatggacagtgatgcccattttgatcttctgatcggggaatttgatcttgccagagaccttctgactaaactggattttccggaagagctggtactgaaccgttctgtggatgccgtgaaaaagtatgtaaaccggaaattctgaaagatagacgactgttctgtattaattgacggtaatacgaaaaaatttctgaaaaaaagttgtcaaaattgaataaaatacttgaaatttgcatggaaatttagtaaaatgtgaacatattaagtaagacaaacagggaggtattacatatggacgttttcagaacagaccgaatcagaaatgtagtcctattaggtcatggtggcgcaggcaaaacaacgctggctgaggcaatggcttatctggcaggtatgacaagcagactcggacgtgttgaggatggcaatactgtcagcgattatgacaaggaagaaataaagagacatttttccatcacaacttctctgatcccggtaccatgggataagatgaaggtaaatgtactggatactcccggatacttcgattttgtgggagaagttgaggaggcagtcagtgccgcagatgcagcgatcatcgttgtttccggtaaggccggtgttcaggttggaacacagaaggcatggaatctctgcgagaaatataaacttccgcgaatgatctttgttacagatatggacgtggatgatgtcagctatcgtgaggtcgtggaagagctgacagagctgtacggcaagaggatcgctccccttcatttcccgatccgtgaggatggtaagtttgtaggttatgtcaatgttgtgaagcaggcaggaagaagatatattgataaggccggcaaggaagaatgcccggttccggattatctgacagaatatcttgagaaatatcatgaaactctgatggagtctgttgcagagacaagcgaagaatttatggaccgttatttcgagggagataccttctccgtagcggaggtttccgccgctattgcaaccaatgtacaggatggaagtattgttccggtatgcatgggatcaccggtgaaccttcgcggtgtatctaaccttctggatgatatctgcggttacttcccaagcccaagcggacgttcctgcaatggtatcgcacagaagactaacgagatctttgaggccaattatgactttgccaaggcaaaatccgcctatgtatttaagactatcgcggatccgttccttggtaaatattctctgatcaaggtatgctccggtgtgctgaaatccgatgatacacttcttaatgtagagaaaggaacagaggagcgtgtaaacaagctttatgtcatggaaggttccaaaccgatcgaagttccggagctttttgcaggggatatcggtgccattgccaagcttggcagtgtacagaccggtgacagccttgcaaccaaggcgaatccaatcctttatccaaaggctatactttccacaccatatacatataagagatttaaggcagtgaaaaagggcgacgaggataagatcgcacagtcccttgccaagatgatgacagaggacagaacactgaaggttgtcaatgacagtgcaaaccgtcagagcctgatctacggtatgggtgatcagcatcttgatatcgttgtcagcaagctgaaggagcgctataaagtggatgtggagctttccaaaccgaaggttccgttccgtgaaacactccgtaagaattcagatgtagaaggcaaacataagaaacagtccggcggacacggacagtatggccacgttaagatgcgctttgagccatctggcgatctggagacaccttatgtatttgagcaggtagttgtaggtggtgcagttccgaagaactacttcccggctgttgagaagggacttcaggaatgtgttctcaagggacctctggctgcatatccggttgttggtgtgaaggcaaccctttacgatggatcttatcatccggtagattcttctgagatggcatttaagatggcaactatccttgccttcaagaagggctttatggaagcgtctcctgtacttcttgagccgatcatctccatgaaggttacagttccggataaatataccggtgatgttatgggagatctgaacaagagacgtggtcgtgttctcggaatgaatccggaccacgaaggaaataccatcattgaggcagatgttccgcttcttgaaatctatggttattccactgtccttcgttccatgaccggtggaagcggagatttctcctatgaatttgcacgctatgagcaggctcctaatgatatccaggagaaagagatcgcggcacgcgcaagcaaggttgacagtgctgacgaataaacagagatattttttgagggcagaataaagagttgacaggctgcagcatttgctgtagcctgtttttagatgcgttcgtgaataagcagtcagaaaaacgaattgcgctcatacaggttattgaagtatgagcaaaaaagaaaagagagaggacaaaaaatgttagtatgtgattatatcgtggaacagattgacggagattatgcacatttgaagcgtgtggatcagccggaggaggaactgaaagtagttgccagagcattacttccggcagaaatctatgagggctgtgagcttcattatgagctgatgcagtattcaatgaaatgataaggctgcaggatatcgcggatatggcaggtgtcagtcgtacaaccgtatccaatgtgatcaatggaaatacaaaacgggtttcacagagcaccattgaccggatcacggcgatcctgaaggagcagaattatgttccccacatgggatctgtgatgctatccggacacggatcaaggatcattggagtggttcttggtttttccttcattcatggtatgcagtctctgcaggattcttttgtgggagagattaccggaacgctgcaggtcgaagcagaaaacagaggctattatattatgctcattggcggtgaacggatcgataatgtggtagatatggcatcccgttggaatgtagagggtcttatcattatagggtataatgaagaacagtatcatcagctttccagaaagctgaataaaaaaatggtattgatcgatgcctatccgaagggtggatatagctttcagaatgtaggagtggatgattattccggcggatatcagatcggggaatatctgcattcctgtggataccaccgggcactttttgttgcggaaacagagcaggacagtgattatgccagatggcttggattcaaacaggctatggaaaaaaatggcggcttctgcagccgctcccgctatgtggtggttccccaggaaccccggcgcagactgaaaaaatatgaagagctgctgcctcattttctggagacaaaggctctggcattttcttcggattacacagctgtggaggccatcaatttttttacagacaggggaatccggattccggatcagatttccattaccggctttgatgataatttttatgcgcagatcgtcaggccaaagctgaccaccattcatcaggatgttcatcagaaagcagttctggccttgcggaagctgcttcttatggcagagggaaaggaacctgccgaaaaaaatgtaaaaagccctgtctggcttgtaaagagagattctgtaaaagagtagcaggatctctttttttatgttgtgatgacttttcctggcacatcatcgaaatacggttggaaattatttttagaggccagtagtgctttattgttaaaactgcataaaaaaaacagaaaagtttggcagtaatttaagtttcacgagaaacttgttgattttaaagggtggataggatatgctgatttcagaatcaacagaaaaaggaggcaatttaccatgaaaaaaaactggtggaaagaaagcgtggtatatcagatctacccgagaagttttaaggacagcaacggagacggaattggtgatattcccgggatcatagaaaaactggactatctgaaagaactgggagtaaatgttctctggatctcacccatgctggaatctccgcaggatgacaatggctatgatatttccgattaccgcaggatctataaagaatatggaaccatggaggattatgaaaagcttcttgaagaagcgcataaacggggcattaagatcctcatggatctggtcgtaaaccatacttccgatgaacacaactggtttattgaaagtaggaaatccaaagataatccttacagggattactatatctggagagagccggtgaatggaaaagaaccgaataactggggaagtgcgttcggaggacctgcatgggagtatgatcctcagacagagatgtattatcttcacctgttttcaagaaaacagccggatctgaactgggaaaatgaaaaggttcgtcaggaagtttacgatatgatgaatttctggtgtgaaaaaggaatcgacggtttccgaatggacgtgatcagcatgatctccaaggatcagtcatatccggatggagaaatgaatggaggattatacggtgattttggtccttactgcgtccatggcccgaggatccatgagtttcttcaggaaatgaacagagaggttttatcccgatacgatgtgatgacagttggagaaacctccggtgtgactatcgaagaggcacagaaatatgcaggtgaggacagaaatgagctgaacatggtgtttcagtttgagcatgtagagggccagggatcagaccatggtaaatggactaccgagaaatacgatttccaggaatttaaaaaggttatgatcaaatggcaggaagagcttgcgggaaaagcatggaacagtctgtttcttggaaatcatgaccagccaagaagtgtttccagatttggaaatgataatccggcatacagggaaacttcagccaagatgctggcaacctgtcttcatatgatgcagggaactccttatgtttatcagggagaagagcttggaatgaccaatgcttattttacagagcttaaggattatcgtgatatcgagagtattcagtatttccatgaatatacagaagcaggtatttatacaccggaatatatgatgaagtgcctgatgctgagaggacgtgacaatgccagaacaccaatgcagtgggaggattctcatcaggccggctttacggagggaacgccatggatcagggtaaactccaattataaggagatcaatgcgaagcagcagctttcagatccgaattctattttccattattatcagaagctgatccgtttaagaaaagaaaaaccggtgatcgtttacggtgtttttgaggcactttacagagatcatgatcagatttttgcatataccagaacccttgagggagagaagcttctcacagtctgcaatttcagtgagcatgtggcagaaatggaaattccggaagaatttcagaaaaatgcagaatgtctgatcacaaatcttggaagaaaggattttggaaagaaagtggtcctgaaaccttatgaggcatttgttctttacagaaatctgtaacaggagagggaaaaatgataaaaaaatatgtatatggagagccctttgagactgaggcactgacagaaaacattgagacagcagaaggaaagccaggatatggagaaatctgtgcagaagatggattttcttttacttatatcatggatgaagaggatatcgtctacggattgggagaatccaaccgcggtatcaacaagagaggattcatttacaccagtaactgtaccgatgatccggagcatacagaggataaacattccctgtacggtgcgcataatcttatcattgtgtccggaaaagaaacctttggaatgttttttgactatccggcagcgatcacctttgacattggctataccagaatggataccatgaaggtaacctgcgaaaatgcagacctgaagctttatgtgatcgaaggggagagtccctatgatattgtaaagcagttccgtcatgtgatcggaagaagctatatcccgccgaaatttgcctttggatttggccagagcagatggggctatactacaaaagaggatttccggaaggttgcagctggatatcgtgaaaatcatattcctattgatatgatctatatggatattgattatatgcagtcttataaggactttacattaagtgaagagaattttcaggattttccggaattcgtaaaggaactgaaggatcaggatatccgtctgattccgatcatcgatgccggcgtcaaggtagagccgggatacgatgtttatgaggagggtgtcaaaaaccgctacttctgccagagagaggacggcagtgattttgtagctgctgtatggccgggggatactcattttccggatgtattgaacaaagatgccagaaaatggttcggtgacaaataccgtttcctgatcgagaagggaatcgacggtttctggaacgatatgaatgagccggcgatcttctattccacagagggaatgaaagaggtcaaagagcttgcaggagaatttgcaaaagatacggaaggaaagatccatatctggaagatgcagagtgcacttcgcaatgttgcaaacaatccggaagattatcggagattttaccataatgtggatggcagaaagatccgccatgacaaagtccataacctgtttggttacaatatgacccgagcagcaggggaggcttttgagcggatcgatccggaaaaacgttttctgatgttctccagatcatcctatattggtatgcatcgttatggtgggatctggaccggcgataataaatcctggtgggctcatatccttttgaacctgaagatgatgccctctctgaatatgtgtggtttcctgtatgcaggagcagatctgggtggatttggcgctgatacaacaagagaactgctgcttcgtttcctggcacttggagtattcacaccgctgatgcgtgatcatacagcgatcggtaccagagagcaggaatgctaccagtttgaaaatgtggaagatttccgtcatgtgatcggtgtaagatatcgtcttattccatatctttacagtgaatatatgaaggcggctctgaacgatgatatgtatttccggccgttgggctttgtttatccggaggataagattgctgtacatgtggaagaccagctgcttcttggaaatgagatcatgatcgctccggtttatgaacagaacgcaagaggccgttatgtatatcttccggaggagatgaagtttgtgaaattccttccggatggaaccattgcagaggagatccttgaaaagggtgttcattatgtagaggtggcactgaatgagattccgttgtttatccggaagggaaaatgtattccggttgcagaagcagcggaatgtgtggcagctctggatacaaaaaatatgcagcttcttggatatgaaggtgcggagtataccttatatgaggacgatggggtccataaggattacgacagagaagaaaattaccgtgttctgaaaaaataaagtcagcaaaatgaaatataaatttctgtgttacatcatttacgttaaacagtataaagaatacaggatgtgaacagttgataaacagaaaagccgtaagtatatgtgaaagtttcttaaacatatatcttacggcttttgctattgctgctttacataaaatattttatgtaaagtaattcgcattctgtttaaataacacttcagaaagatttgtttatgcttcttcctcaatctggataacatttttcagtacagagcagcatgccatgtcaccgataacattgacacaggtggcgcccatatcacagagggtattgatgctgatataaacaccaagaactccggcaggaagtccggccatagttgccagtgctgcgaaagatgcgatagcaccaccgggaacacctggagtaccaacggaaagcagtacgtttgcaagaaggataatgatcataagaggaatacttacatggatcccgcaggcgtttgcaaagaacatgatcataaaggacatcaggatagatacagcatccatattaacggtagcaccaagaggaatggcgatgctggtgatctggttggatacgcccatttcttcttccatacactgcttgcttaatggaatggttgcggagcttgagcaggttccgaaggcgttcagtgctgctggcaggatcgctttcaggaatttcagcggactctgtttgccgatcagctttacagagaaaccgtacactacaatagcgaagccaaagaatgccacatacagaatgacaagctgtgttgcaagggaaatgatcgtttcagttccgttggcttccacaaccggtacgatggtacagaaaacaccgatgggtgtaaagtacatgatggttgtgatgatcttcaggcatacttcattgatggaatcaatcagattcaggaatggagttcctttttcaccgactgcgatcagtgtgaaaccgatgatcagggcaaataccagaacctggagcatgtttccgtcagcaaatgcggcgattgggttggaagggatcaggtttttcagggtgtcaaggatactgctcatttctgtagcctggatatcggctgttgccatctcaaatttgactccctttccgagatggatcaatctcgggatgatcagtccgcacaggctggcaagtgccgttgtgcagagaaaatagatcatggatgctgcagtgatcttgccggtagtacgtgcgtttccgatggaacagattccaatgacaatggaacagaagaccatgggaaagatcatcatgttcagggcgttcatgtagatacttccgatcagactggtcacagtgaggacaggttcaaaccgtccggccaggaaaagtcctgtgaggatacccaggatcagtcctgtaaagatcgcaccggtaatatgcttccggtaccaggaataaaaagatttcatttatgcgttccctcctaagataaatatgtatggtatgtataatataggaaaatacatgcaggaaattatatcatgtgaaaaaagaagcgtcaactaaaccaggccaggattgcaggttcatgtatattttgatggaaaagggctgtttttggatttttgtttgacaaatacatcataagtagttaaaattaatagcagtgtgtgaaagcattaaagtattaatactgagtaatttgtcaggaggaataaaaaaatggctgcaccttataaccatagagccatcgaagcgaaatggcgcacaaactgggagaaaaagccggtaaatgtcaatgatggcaagaaaccgaaatactactgtctggatatgttcccgtatccgtccggaaacggtcttcatgtaggacactggagaggctatgtgatctctgatgtatggagccgctataaaatgcttcagggttattacctgatccatccgatgggatgggacgcttttggtctcccggctgagaactatgccatcaagatgggtgttcatccggcagtatctacagcagcaaacatcaaaaatatcaaacgtcagatcaacgatatcgcagcgatctatgactgggatatggaggttaacacaacagatccggaattctataaatggacacagtggatctttgtaaaaatgttcaaagaggggcttgcatatgagaaggagttcccgatcaactggtgcccttcctgtaagacaggtcttgcaaatgaagaggttgtaaacggatgctgcgagcgttgtggcactccggttaccaaaaagaacctccgtcagtggatgctccgcatcacaaaatatgcagacagacttttaagtgatctggataaactggactggccggagaaggttaaaaagatgcagacagactggatcggcaaatcctacggcgcagaggtcgatttcccggttgagggaagagaagagaagatcacggtctatacaacaagaccggatactcttcatggagcaacattcatggtacttgcaccggagcatgctcttgcaaaatctcttgcaacagacgagacaagagaggctgtagagaaatatatctttgatgcttccatgaaatccaatgtagaccgtcttcaggataaagagaagaccggtgtgttcacaggtacttatgcgatcaatccgctgaacggcgagaagcttccaatctggctttctgactatgtacttgctgattatggtacaggtgctatcatgtgtgtacctgctcatgatgaccgtgactttgagttcgcaaagaaattcgatattccgatcatccaggttatcgcaaaagatggtaaagaaattcagaatatgacagaagcttacacagaggcttccggaaccatgatcaactccggtgagtggaacggaatggaatcttccgtactgaagaaggaagcaccgcatatcatcgagaagctgggtatcggacgtaagactgtcaactacaaactgagagactgggtattttcccgtcagcgttactggggtgagccgatcccgatcgtacactgcccgaaatgcggtgcggtaccggtaccggaggatcagcttccgttaagacttccggaggtagaaagctaccagccgacaggaaccggagagtcaccgcttgcagctattgacgagtgggtaaataccacatgcccatgctgtggtgctcctgcaaaacgtgagacaaacaccatgcctcagtgggcaggatcttcctggtatttcctccgttatgtagataataagaataataaagaactggtttccaaagagaaagctgataaatatctgccggtagatatgtatatcggtggtgtagagcatgctgttcttcatcttctgtactccagattctacaccaagttcctgtatgatatcggagctattgatttcgatgagccgtttgtcaagctgttcaaccagggtatgatcacaggtaaaaacggaatcaagatgagtaaatccaaaggaaatgttatttcaccggatgatcttgtaaatgattacggatgtgattccttacgtatgtatgagctgttcgtaggaccgccggaactggatgcagaatgggatgacagaggaatcgatggtgtatccagattcctgaaacgtttctggaatctagctcttgacagcattgagaaagatatcccggctaccaaagagatggagaagacccgtcataagatggtatacgatatcaccagcagacttgaggccttcagcctgaataccgtagtgtccggatttatggaatacacaaacaagctgatcgctatcgcaaagcagaacaacggcgctgttgacaaagaaaccatcgagacagttaccattcttcttgcgccatttgttcctcatattgcagaggagatctgggagaagcttggtcatgaggattccattttccatgcacagtggccggctcacgatgaggagcttatgaaggatgatgagatcgaggttccggttcagatcaacggcaagaccaaggctgttatcagtattccggcagaaatctccaaagaagatgcgattgccgaaggaaagaaggcagttgcagataagatttccggaaatatcatcaaagagatttacgtaccgaagaagatcatcaatatcgtagtaaagtaataagataaatcaaaaacacccgaagcagggcggaagatatttctgcctttgccagggtgttttttatatggataaacatcgtgaagtaagtatgcacaaaaataactaatgttatttagaataaatgccaataatatttaggcattttaacagatttgcctagtttttggtcatgccaattatattgtctattgttattcaaatggaaaaaacgtacagtaacaccatgagtcaggcaaagatagtaagaaagctttggtactcgaaatgcagtgtgacggaatgaagatgtccgtttagctagattgcatatttacattgagagaaataaggagagatagtatgagcgcaatgaacacacttaagaaattcggacttgaacaggcattcaattatgtttataaagatccggataagaattttatcaagatcatggactgggcagataaattttccggtggtggatttcctacacagagagcaatgatccgcgcagccatttctaatccggaacatccgtattatccgtttattcatagattggtaactgatattgatccgcatgttatgaaaactctggttgcaaacttctttatcaatgcaaatcttgcaggctggaagaaacaggatgaatgccgtgagaaatatggctgtaatatcccgtgggcaatccttcttgacccaacaagtgcatgtaacctgcactgtacaggatgctgggcagcagagtatggaaacaagctgaacctcacctacgatgagatcgatgacatcatccgccagggtaaggagcttggcgtttatatgtatatttacacaggcggagagccacttgtaagaaaaaaggatctgatccgtctttgcgagaaacataatgactgtatcttcctttccttcacaaatgcaacactgatcgatgaggattttgcaaatgatatgcttcgggtaggaaactttgttcctgcaatttcactggaaggatttgagactgcaacagatggcagaagaggaaatggtgtataccagaaggttatcaaggccatcaatcttctcagagagaagaagcttgtatttggtatctctgcatgttatacgagtgcaaatttcgagtctatcacatcagaggcattttacgacagcctgatcgatcttggagcgtactttatctggtatttccattatatgccggttggaaatgatgcagcaccggagctgcttcctactcctgcacagagaagagaaacctatgagcgtatccgtaaataccgtgcaacaaagccgttgtttgccatggatttccagaatgatgcagagtttgtgggaggatgtattgcaggcggccgtcgctatctgcatatcaatgcaaacggcgatatcgatccatgtgtgtttatccattattctgattccaatatccgcgagaaaacacttctggaagcactgcagtctccgatgatgatggcatatcatgacggacagccgtttaatgacaatatgtaccgtccatgcccgatgcttgaaaatccgcagaagctgagagaaatggtagaaaaatccggagcacattccacagatcttcagtcaccggagagtgcagagcatctctgtgcgaaatgtgaccggtatgctgaaaactggaagccggtagcagaggaaatgtggaaggaagaccaggagagaaaggcagcgaagaaaggctgctgatcctgaaacttaaaaaagcagaacttatgaaagagcacggtaccggaaacaggtgccggtgctctttttttgaaaacggagggatcagaccatgaaaaaaatgattgataacatcagaaaatatctgccggcggtgctccttcttgtgcttctccttttctgtatccgttatagagaggatctgtctgtggaaaggatcttaagctatacaccggaggaacctgttaaggctgcattacttatgcttgggctttatgcagtgaaaagtgtctcttttatatttccaattgcgatcctgcagcttgctgtagggcatctgttttctacaggaacagcacttctggtgaactttctgggaagagcagtcacattggcacttccatattggatgggacgcttctcaggtgcatccatggtggaaagtcttacagctaaatatccgaaactgaaaacagtagtagattaccagaacggaaattgcctgtatatttcattttttatgcggacattgaactttttaccgggagatgctgtgagtctgtttctcggagctgaaaagattccatttggaacctatatggcaggtggcgtgcttggaacgctgccgggagttattctcgctacaatatttggagcaaatatcaaaaatccgaagtctccggcattctggctctccgcagtgcttcttgtgatgatcagtgtattctcgatcctgatacacaggcatatttcacggaagaaaaaataacagggctttctcttcctgcttttactgagaggaaaaatgtagtataatgcagacagtaaagaaaagaagggaaggaacatggggatcgatcataacaaaagattaaaggaacatttatattattacagtgcaagaatcagccgggatatctcaaatctgatcaagtggctggtttttgctgtcattacaggatgtatcgtaggtgctgccagcacactgttttcttttacgttgaaggcagtgaccagttaccggaaggcgcatgaatggatttttcttttgctgccattatccggacttgtcattgtatttttgtatgagaagcttggaaaagaggatggagggaccaatcaggttctttctaccgtgcgttccagagatgatgtgccaatcctttctgcgcctctgatctttatcacaacggcgctgactcatcttgccggtggttctgcgggacgtgagggagcagcgatccagcttggaggaagtattgccaaccagcttggaagatggatccatctggacgaggaggaccgtcatgtaattgttatgtgcggcatgagcgcggcgttttccgcattgtttggaacaccgatggcagcggcagtttttgcgctggaagtggtcagtgtgggcgtgatgtattatgcagcactgatgccgtgtatgatcgcgtcattgattgcttccggatttgcagccggaatgggagtcacacctgaaagttttcatgtgacggatattccggcactgactgtggaaactggcctgaaaatgggagtgatcgctctgggctgtgcaattgtcagcattatgttctgtattgcgctgaatggtgcagcaggactttatggcagatggtttaagaataaatatgtcagggttgcagtgggcgcctgcctggtcattgttgtcacctttattctgagaacagatgaatatatgggcgctggtgcggagcttattgaaaaagcggtggaaaacggacaggcggatactttcgcctttttctggaaaatggtgcttacagcactgactatgcgcgcaggattccgcgggggagagatcgtaccttctttctgcattggagctacctttggctgtgtgatgggtaatcttatgggaatttctccgtcgatctgtgcagcctgcggaatggcagcagttttctgcggtgtgaccaactgtccgatcacttcgatcctgatcgcttttgaaatgtttggctttaagggagtatccttctatctgatcgcagtatctatcagctatgcagcatcgggatattatggcctttacaaggatcagaccattgtgtactccaaatataaagcaaaatatgtgaaccgacataccagattctgatatagaacgaaatgtgaaggggtgtgtatactggcataatatcttatggaataccgcatggacatggctggaaaatatctggacatctgcggaaatctgatgtaatatattaaacgttagtatttacagaaaggcagattttaaggtatggaagagaagattcttgattttatcatggagtatgcacaggagaatgagggagtcccgtttcaggtgatcgaggagaattttaatatcgttatggatgataagctgaaagatatcatcagtgatgcgatctgggacagagacaatgtttctgatgtgatcatggaaagtgagcgttatgtgatcacctgttttgaagattaatacaggactatctgtgaccgttacggtaatggaattaagaaatctgatatgaggagaatgcatatagggcattctccttttttcgtcaatctgtcaaaagaatccaaaagaatctaaaagaatctaaaagaattgaagttccctaaaaagaatgatatcctaaagaaaaacagatggggtggttgaaatgaacagcaaatatgagatcagcacaaaagaaaaccgggaatttctgaaagcatcctgtgaggagcttttgaatttcgggcatcggtttccttcaccgaatggaggttcctattatctgggggacgacggaacaccatggaaggacagaaaccgggaaacctggatcacctgtcgtatggcgcatgtatacagtctgggtctgatgcttggccatgagggaagcgaagagcttgcggatgcggcattgaaaggtctgaagggagagcttcacgatgaaaaaaacggtggctggtatgcaggtgtaacaccggaaggagatattgtgcccaataaacagtgttatgcccatgcatttgtgatcctggctgcatcttccgcactgacagccggaaggcccggggcgaaagagctccttgaagaggcattggctgtttatgaccgacatttctggaatgaagaggaagggctggcctgcgacacctggaatacggaatttaccgtgctggatgattatcggggattaaatgccaatatgcatacggtagaggcttttctggcagcaggagatgtcaccggggataaaaaatatcacattcgtgcaggcaggatcattgatcatgtgatccagtgggcagaagataactcctggaggatcccggaacattttacgaaggaatgggtggcagatcttgactgcaaccgtgaccgtccggatgatccgttcaagccatacggcgcaacaccgggacatggaatcgaatgggcaaggctgatcacacagtggacgcttgcaaactgtggagaagagaaagaaaaactggaaaaacatcttcaggcagcagaaaatctttacacaacagcaataaaagacggctggaacgcagatggtgcaccgggaattgtatacacgacagattggaatggcaaaccggtggtacatgaccgtatgcactggactcttgcggaagcgatcaatacctctgcagttctttatcatgtgaccggtaaggagaaatatgcgaaagattatgctgcgtttatgaagtacctggatgaagtggtcatggatcacgaaaacggctcctggtttcatcagctggatgagcagaatcatctgaaaggaaccgtatggcccggaaaatccgatctgtaccatgcactgcagtctacactgatcccatatcataaagcagatacgtctattgcaccggcagtgaagaaaaaactggagatctgaacaaaatcgttttgcgatttttgttcgtgagcatgtaacgaagcggagtgcgaatgttcaataaaaaaaacttcctgtgtttacagaaaaatttctcaggacagatacttgcagagatacaggtatccggtcttgaagaaatacgagaacacaggaaggttttttgttgaatagttattactccgtaacctctttcagatccgaaatatccggagaagccatgagagaataattggtgtaataaacaacgaaaccgggtttcgcaccggcaggttttttcacatgctttttctggatataatcgatctctaccttgggagcagagtgtcctttggagtaccaggctgccaggcggcctgcttcttcgaaagtacggtccggaagttcaccgtctttggtgcggacgatcacatgggaaccagccattttctttgcatggaaccaccagtcatttccggttgcgaacttgaaagtcagctcatcattctggaaattgttttttcccacatagatatcaaaaccgtcactggatatgtagtggagcggtttggatttcggctgggctttctggccttttttgtttgtgtagtgacgtttgatatagccgtactcagtgagctcttccttgatctgggaaaggtcactttcagatctggcgatatccagagcattggagatagattccagatgagagatctcactttccgtatctgtgatctgttctgtgacggcttcctctgtacgctttagctttccgtatttatcaaaatatttcttggaattctgtgccggagtcagtgtcgggtcaagagggatagtgatctcctcgttggtgtaatagttcagtgctttaaaggatctgcagccttcctcaagcccgtatccgtaggtgttgatcagttcaccgtagaccttgaatttatctttttttgtagtatcattcagctgctttttctggatgttgtatttttttcggttacgttccagagcggtctgtactacacggcgaagatcggaggatttctggtggatacgtgtcagcagacttttggtagcataataggtctccagcataacagagacactgtcaaagatttcgctgcggtattcactgccaaactgctgataaggaaagacaccgtattccacaggttcctctccgcggtagacaatatttggggtgaactctctgttccggatctgttccataaggcggagaaaggtatgataaagatgggtgcaggctgcctcatctagggactgcgatgcatcgcttccgtcaatggatgcacggtagcagatctcctcagccattaccgggctcatacctgtgagtgaagtgtaaagcgccttggaaatattcacaggctttttacagatgtgctgtgtgaactcctcctcggaaacagtcagcggattttctttatccctagtattgggaatgaaatattctcttccgggaagaacctcacggacagagctcatatgagaagagacatgtttgatgctgtccaggatcattcccttttcgtcacagaagatgatgttgctgtgcttgcccatcagttccatgatcagacgctttctgcagggatcccccagctcattaagatgctccagctcaaattccaccacgcgctccattccaggctgcttcacatcaaggatacgggcgcttccgatgtgctttctgagaagcatgcaaaagttcggcgcggttaaaggactgatacggttcttatctgtaaaatagatcagaggaagggatgcgcttgcacttaagagaagacgtttctgtccatttgagccctttcctgtgatcaaaagttcatcgttctccggctgggcgatcttgttgatacgtccgccttttaaattatcatcgatctctgccacgagagcagaaactgtaattccgtcaaatgccatgattttacctccatttcaacatcaatcattataacagtaaaaaaagagtttgactagggttttggaatgaactataataaatccgtatgcaatcagttactgcatttatcagtagctgataaacttaagaggcagtattggaggataacatgataaaaagtatgaccggctttggcagggcagaagcagtttccagagagcgtaaggtttctgttgaactgaaatccgtcaatcacagatatctggatctgaacatcaaaatgccgaaaagactcagctattttgagggagagatccgaaatgtgatgaagacttatatccgtcgtggcaaggtcgatgtgttcatcacctatgaagactatacaatgggcggaatggctctgaaatataatgcagagttggcaaaggaatatctgggctatctgaaccagatgagtgaggagctggggatcgagaatgatatccgagtttccacactttccagatatccggatgtgtttacaatggaagagcaggctccggatgaggaagagctctggaatttcctggagggtccgcttcatgaggcctgcctgaaatttgtggagacccgccagcgtgagggtgctaatctgaaacaggatcttcttgggaagctggacggactggaagcaaaggtcgatgtggtggaaaaacgttctccggaagtagtgaaggcttatcgggagaagctggaagccaagatgcacgagctacttgaagataaccagatcgatgattccaggatcgccgcagaggtgatacttttttcagataagatctgcaatgatgaggagacggtacgtcttcgaagccacatccacggaatgagaaagatcctggatgagaacgagggcgtgggacgtaagatggatttcatggcacaggagatgaaccgtgaggcgaatactatcctgtctaaatccaatgatcttattgtatccaacgcggccatcgatctgaagacagagatcgagaagatccgtgaacagatccagaatatcgagtaaccgggcaggaaacaggctgtacacagacagaaagggagagcgtaaatggcgaaacttattaatgtaggctttggaaatgttgtcaattcacgcaagatcgtggctgtggtaagtccggatgccgctcctgtaaagcgcatgatacagagtgtcaaggggacccgaactctgatcgatgccacacagggaagaaaaacaaaagcagtgatcgttacttccgatgattatcttgtcctttccgctctgcagccggaaactattgccaggagattttcggaagcgtatggagaggaaatgagggaggaaggaaatgagtaagggaattttagttgttgtttcgggcttttccggttccggaaaaggtactgtcatgaaacggctgatggaaaaatatgacaattatgcattatctgtttctgttactaccagaaatccaagaccgggtgagaaggacggagaggcttatttcttccgcacaaaagaagaatttgaacagctgatccgggaagacggactgatcgagtatgcacagtatgtggagaattattatggtacaccccgcaaatatgtagaggagcagctttccgcagggaaagatgtgatccttgagatcgagatccagggtgccatgaagatccgtgagaagtttccggatacactgctggtatttgtatgtccgccgtctatggaggagcttaagaaccgtctggtaggtcgcggaacagagactctggatgtgatcaacgggcgtctcagaagagcggttgaagaatccagaggaatggataaatatgattatctcctgatcaatgatgatctggaggaatgtgttgatacacttcatgagaccatccggtgtgagcgcatgcgtacatctaggaatcatgattttgtatccaggatccagaaagaagcggaagcttttttataaataccaattaacaagttaaatacggccctgccgttacagaagggagaaaagatatgatacatccatcttattcagaattaattgaggctatcaacacaaacaacgaggacgacgatgaggctctcgtgctgaacagccgttattctcttgtacttgcagcaagcaaacgtgcccgccagctgatcgcaggagcagagccgcttgtaccgggtgcagcaggaaagaaaccgctttccgttgccattgatgagctttacaagggcaaagtaaagatccttcccggacaggaggaagaggaagagctggaggctcttgaagcagcagagggcgagaccgcagagggcactgagactgcagaagcagctcagacagaagcggagtaattttatgaaaatattattcatctctcttggctgtgacaagaacctggcggattctgaggaaatgctgggacttcttacagccggaggtcatgagatcacagacgatgaaacacaggcagatgctatcgtgatcaatacctgctgttttatcaaggatgccaaggaagagagtgtggaaaccattcttgaaatggcagagtacaaaaaaacaggaagctgccatgcactgatcgttaccggctgtatggcacagcgataccagaaagagatcattgaggaggttccggaggtcgatgctgttcttggaactacatcctacggcgacatcgtaaaggctctggaggaagcagtagccggaaatcatttcgaagaattccgtgatattgattatctgccggatacaggaagcaaacgtgtccttacaacaggtggacatttcggctacctgaagatcgcggaaggctgcgacaagcactgtacctactgcatcatcccgaagctcagaggtaaatttcgaagcgtcccaatggagcgcctcattgcccaggcagaggatatggctgaacagggagtgaaagagctgatcctggtagcacaggagaccaccgtttacggaaaggatctttacggcaaaaaatctcttcacattcttttaaagaagctctgtgagattagaggtatccgttggatccgcatcctttactgttatccggaggagatttacgatgaactgatcgaaaccattcgtgatgagaagaagatctgtcattatctggatattccgatccagcacgcatcggaccgaattcttaaaagaatgggccgccgtacttccaaacaggaactgatcgatattgtcggaaagctccgtaaggagattccggatatcgtactgcgtacaactctgatcaccggatttccgggtgagacggaggaagaccatgaagaactgaaggagttcgtagatgagatggaatttgaccgtctcggtgtcttcacttactctccggaggagaataccccggcagcagagatggcagaccaggttccggaagaagtgaaggaagaacgcagagacgagctgatggagcttcagcaggagatttcttatgacagaggccaggaccgtatcggacaggaacttcttgttatgatcgaaggaaaagttgcagatgaaagtgcctatatcggacgtacctacggggatgcaccgaaggttgacggatacattttcgttcagacaggcgaactgcttatgacaggtgattttgcaaaggtacgtgtgacaggtgcgcttgagtatgatttgataggagtgctgagcgatgaatacaccgaataaacttacagttgcaagaatgatacttgtaccatttcttgtagttttcttactgacaggctggggaggagaagcaaaccgctggatctgtcttgcgatttttgtcgcagcaagtgtgacagactggtttgacggtcatcttgccagaaaatataacctgataaccaattttggaaaatttatggatccgctggcagacaagcttctggtatgctctgccatgatctgcatgatcgaggttgacaagcttccggcatgggttgtgatcattatcatcggacgggaatttatcattagcggtttccgtctgatcgcagcggagaacggaattgtcattgccgcaaactactggggaaaattcaaaaccgtttcccagatgatcatgatcatacttctgatgctggatttcggaggtgtttttgcagtgctgacacagatatttatctggctgtccgttgcactgaccattatctccctgctgacttatatcatgcagaacagaaaggtcctttccatgcaggagtagggatcagagtatacgaaaggagtttcttttcatgatcacagaactgatatccgtaggaaccgagatccttctaggaaatatcgtaaataccaacagcgcctatctttctgaaaaatgcgccctgcttgggttaagtgtttactatcaggatgtagtaggtgataatgaaggccgtatgcgtgacgtgatccgtactgcactggatcgttccgatgttgtgatcctcaccggaggtcttggaccaacagaggatgatatcaccaaggaagtaactgcggatctgatgggaatgtctcttaaggaagattcccactcaaggaaactgatcgataaatatctgaaggaatatgagaaaaacaatcctcagagacgtatcacgaagaacaactataaacaggccatggttcctgagggagccattgttcttgacaatcataacggaactgctccgggactgatccttgagaaaaaaggaaaaaccgcgatccttcttcctggacctcccaatgagctgaagcccatgttcgaggagtacgtggtcccatatctgcagaaaaaccagccggagatcattgtgtcccagatggtaaagattagcgggatcggtgagagtcaggtagcagaggaaatccaggatctgatcgaaagccagaccaatcctaccattgcaccttatgcaaaaaccggtgaagtgcatcttcgtgtgacagcaagcgcagagaatgaaaaggcctgcagaaagctgatcaaaccggttgtcaaggagctaaagaagcgttttggagagaatgttttcgccacagatgagagcaagacactggaggaagcagtgatcgatcttctgaaagagaaagatctgaagctttccctggcggaatcgcttaccggcggtatgatcgcccagcgcattgtcaatgtatccggtgcgtctgaggtgtttggctatggctttgtgacttacagtaacaaggccaagcataaatgtctgggagtgaagaagcgtactctgaaggagcagggggcagtttccgccaaatgtgccagagaaatggcaaagggcgcctgcaaagcatccggagcagacatcagtatttccgtgacgggtctggcaggaccgggaggcggaacaaaggaaactccggttggtactgtatttatgggctgctgctataagggcaaggctattgccaaagagttccactttacaggaaatcgcatgcggatccgcgagcagactacagcgcatgcactggcgatgttacgtgactgtatcattatgagcagatagcgaatgtcttgatctgcctgctattacggatcaaccatgatattttttatataacaggactgatttttaaacagatgaaactttcgatttcaagtatctgtatcaaaaatcagtcctgttttatttttgtttcctgacaataagccccggtatgggcgatgaaagaatataaacgatcatatttacaaggatactatcataagtgctagtgtttttataagggatttcctctaaaatgtgattaaagcaatatatgacgtaaatatacgttttaccggaaagggggaaatcagaatgaaaaagagaaaaaatctattgtgttttgtgctgctgatcagccttatttttacgatggcatttggaagtgtgacggtcagcgccgcaccaaaactgaacagaacaaaagtaactcttttaaaaggtgagaagacaacacttaaggttaccggaaccaggcagaaggttgcctggagatcttccaaaaagagtgttgcgaccgtaaacagcaaaggtcaggtggttgccaaaaataaaggttccgcaacgatctatgcaaaggtaagcaaaaaaacgtataaatgtgttgtaaaggtagaaacaccgaagctcagcaggacatcgctgacattaacagaaaagaaatccagtgccattaaattgacaggaacaactgtgaaggtgaaatattcttcttccaatccgaagatcgcacgtgtggattccaaaggaaagatcaccgcagtgaaaaaaggaacagcagtgatcacagcgaaggcaaatacgaagaaattcaactgtaaggttacagtaaaagcagcgcagaaaccgaagccgacacctacaccggtgccgaaaccatctttaagtgacaccaccttaaatatgaataaaggtgatgtgagacagcttcaggtaaagaattataaagagattcttgtatggaccagtgatgatacatctgttgcaactgtagacagtaaaggcaaggtaacggcagtgaatgtgggaacaacaaagatccaggtccgggataagagtacctggcgaggcagctgtactgtccacgtgacacagacagtaaagaaacaggtggagccggttcttacaaaaggaactaaatctgcaaaaaaagagatcaccaatgataaaggacagaaggaagtcattaatgtaacgataaatacctatacttacacctttaccacgatcccgaccaatgcagaggaactgaaacagtatgatatcacaacggcagacggacgctataagaccatggctctgctgatccttgcatatcgtacctggacaccgaccaatccgacggactgcgaggagatgatttcttatctcaataataaagagatgactcagtattacaaaaactttttgagggatcgtatgaaagcggataacggatataaatatcttggcaattcttacctgaacggagcaactccggccaacaattatactccgtctaaaccgatttccattacgttaagacaggacacacttccgggtaagggaaattccatcagtgaagatatcccgtattttgaaccgacccagaccactcctgcgatctacagatcatttactgattttgcaggcagcgacagttccagatggatctgtacatataagcactcaaaaaccggaaaatggtatatctgggatcagtcctggcatgatcttcttaccaggatcaaacagccggcaggaaactatgaatattgatcgaatgtgaatgtaccgctattcaatcccattctaaaaaaggaaccgacagcgtaaaaactgtcggttcctttttggcatacataatagaatatctcatcggtgcagcgcaaacttttcaatggcgcgtgctacaccgtcttcgtcattggaagcagtaatataatcggctgcttcttttacctggggctgtgcattggccatggctacgccaaaaccgacttcccggagaagatggacatcgttgtcaccgtctccgcatgccataatggattcccttgggattcccagcatttcgccaagagcaacaagagaggttcctttgttgacaccggcggcgttgatctcaatattgtagcttaaggagcctacaagctccagctccttaagttcacttaattccttccaggcggcggcacgttcctccatgtctgcaaaaagcgcctggactttatccatgcttctgttttcttttgtaatgacatcctggatgtccggaaccgcgatacgggtagtacggacataattccacatattagggtcgtgatggtattttcctacattatcaagcttggcagcgtctgcatatccctggccgtcaaaatagatctcacttaaagtatcatatttttcaaagatacggagagctttttttgcactttccatgggaagaagctgctcgataagaagtttattatggtctgtatcaaggactctggctccgttggaggtgagagcatagtgaattcccggaaaatttctcagttccgcgggaatgccggtatatggccggccggtagccatcagaacaaggatacctgcatcaatagcttccctgagaacgcgcctggtattttctgtgagttctttttttgtattcagaagagttccgtccagatcaagaccgatcatttttatctgctgcatatttaagatttcctttcccggttaaggtcacatatacagaaaaaccgtcccgaaaaaacattttccgggacggtatctatctgtttatcagatatcaagaagatcactgtaaactttcagtgctccgtctgtatcatgagcgagaacacgttttgcaagaaccttaccaagctgtacaccctcctggtcaaagctgttcaggttccatacaaagccctggaacatgatcttgttctcaaagtgtgcaagaagcgcacccagagacttcggtgtaagttcctcaccaacaatgatactggaaggacgtccgcccttgaagtttttgttcaggttctcatcttcttttccacatgcaaaagcaacgatctgtgctgcaacgtttgcacagagcttctgctggcttgtgctgttctcgatatcaacatcaacaccaagctggctcttcttaaagccgatgaactgaagcggaacaatattggttccctgatgcagaagctggtagaaggagtgctgtccgttggttcctggctcaccaaagatcaccggtccggtcacataatccactggctcaccaaagcggtttacagatttaccgttagactccatatcacactgctgaagatgagcagggaagcggcttaatgcctgtgagtatggtaaaactgcagtagaaggatatccctgtacatttctctcataaacgccgatcagggcatccagcatatccgggttctcaagaatgttcttatttgttgcaagcttatcctcctcggcagctccgtcaaggatgtctgcgaatacttccggtccgaatgcaagggaaaggatcgctccgcctacgccggaaacggaagagtaacgtccgccgatatagtcatccatgaaaatagcggtaaggtactcatcactctttgcaagaggagaggtctcactggttacagcaagcatatgtctggacgggttcaggcccgcttttgtaagggcgtcttttacgaatgcctcatttgtcagagtttcaagtgttgtaccggatttggatacaacgatgaaaagagagtgagcaagatctacagatgcaagaacagcagctgcatcatccgggtcaacgttgctgatgaattttgcttccatcttgaaggtgttgtttgcctttgcccagttctcaagtgcgatatataatgcacgcggtcccaggtcacttccgccgataccgatctgtacaaccgtagtgaatttctcaccggcttcatttgtgatctcgcctgcatgtactttgtttgcaaaatctgcagctttcttctgctgagctacatagaattctcgcttgtccacaccgtcaacaacaacaggctcgccaagctgtgtacgtgcaagatgatgaaggaccatacgtttctcgcctgtgttgatcactgcgccgttatataattcctggaatttttcgatcagttctgcctcatcagccagtttggaaagtgcgtcaagaacggtctcgtccacttccttagctgcgtaattgtaagccagacctgctgccatcggtacgctgtacttctttacacgttctgcaccctgctcgccggacattgcttctgcaatgttcacgtgatctttcagactattaagtttgctgtaagaagcaagagtgtccagatttttccatgttgccataatcatattcctcctttaatgactgtgatcagagatatcaacataaatccttcggatatctttttcacaattgtctacagccaattatactgaaaaaagctctggatttcaacggaaggaacgatttaattggtgaaaatcttgttaaataaggtaaaaaatatcagagataacaggatcgtgacggaaatatgaagaagtttccgtcagcagcaggacaggaatggggaaatatgatatgatagaaaacagatcacccggagaaaaaagccgggaatataataagtgatgaagggaattgttttatggaggaaatgaagaaaaaaggaaatgtgatcgcactgctgcctatcggtgtttttctggtcctgtatctgggactggggattttgtttgagtatgtgatgaagatccctatgggattttataatgtaccgatcgttgtggcttttctgtctgcgatcttggtggcatgtgttcagaacagaacgatcagctttgacagaaagctggagcttatggcaaaaggagtaggagataaaaatatcatcaccatgcttctgatctttctgaccgcaggctcttttgtgggtgttgtggggcgcagcagtgcagaaagtgtggcctactgtatgctttctctgataccggcacgtttttctgttgcggtattgtttgtagttgcctgcttcgtatctgtggctatgggaacttccgttgggacgatcacgcttcttacccctattgcggtagcggtttccaaagcttccggttttgatatggcattttgtgtggcatcggtgatgggaggagccatgtttggtgacaacctttcttttatttctgataccacgatcgcagcctgcaacggtcagggctgtcagatgaaagataaattccgggaaaacttctggattgcatttccggcagctgttgttacactgctcctgatccttatcctgtcttttcagacagagattcagggaagagtggtacaggattatcatcttgtgcagatccttccgtatgttctggtgctgattggcgggattatcggcatcaatgtatttgtggtacttctgatcggaattgtctccggagcgtttattatgcttcttggaggacatatcacgccggtggagcttctgaccaatatcggatccggtgtttccggaatgttcgagacctgtatggtggctatccttgtagcagccatgtgtgcgctgatccgggagcatggaggctttgaagcactgctttccggaatacagagagtttttaaagggaaaaaaggcggacttcttggtatgggacttctggttggaactatggatatcgcaacagccaataatacggtagctattgttatggccaaccccattgcaaaggaaatggcgctggaatataagatcacttccagaaagacagcttctatcctggatacattttcctgtattttccagggggtgatcccatatggagcccagatgctggttgccatttctgcggcaaaggaactgggatttgagctttctgcttttcagatcatgccgaaactgttttaccccatgcttctgcttgcgagttctctgatcgcgatctttggtataaaaggcggggatgataaatgaatcaggaagagatgatccgggatgtccggaaaagactgtttgaaatgcaggatacaggatatcgggattttcatgcaaggctggttccgactgtggagaaagaaaagatcatcggtatccggacaccgatactccggaaatttgcaaaagaatttggaaaaacagaaagatccgaaatgttcctgaaggttcttcctcatcagtattatgaggaaaataatctccatggcctgctgatcgagcagatcagagattatgataaatgtctgggagaactggagcgttttcttccgtatattgataactgggcgacctgtgatctgctggcgctccatatgatgaaaaaacaccgtgatatatttatccgggaggtttatcgctggatggagtcggataagccgtatatcatccggttcgggatcagtatgctgatgcgccattatctggacgaaggatttaaaccggaatatccggagaaagtggcatccatccgctcggaagaatattatgtaaatatgatgcgggcctggtattttgcaacagcactggcaaaacagtatgagaagatcctgccattcctggaagagcagagaatggatatttggactcataataagacgatccagaaatccattgaaagctaccggatcacacaggagcagaaggatcatctcaggacactgcggataaagaaataaacagcaggtaagggttggaatatgaaggcaatatcgatctatgcacttacaagaaatcagaatatggaatgtatccagaaactggagcgtcagctttctggcagagattttttcctccggattaaagagtgggaactggaaagtatgaaagcgctggtgaaacagctggaactacatatggaagaagtatataaactccgttttttttattcgtttcagattccgaagcttggaaaggagtttgaccttcttcagatcaaagatgaccagattgtgaatattgaactgaaaagcggcagcgtatcggacgaggccatccggagacagctgatccagaaccggtattatctgtctgtttttgggaaatcgatcctgtcttatacctatatcagcagtgaagatcgtctggtgagactgaccaatcacgatcacattgtggaaggggactggaaacagctatgtattgcattggggaaagaaagcccggactatgagggagatatcgaggatctgtttcaggcagagctttatctgatctctccgctgacagaaccggagcgttttctcaaaaaagagtatttccttacttcccagcagagagatattgaacggcagattctgaagagaatacgtggagaaagaggaggatatttctggttcagcggacttccaggaaccggaaaaacattgttgctttatgatattgcgatgaagttgtccgtgcgccagagagtctgtatcattcactgtggagaggcgggaaaagaatggaagattcttcatgaacgtctgcggcggatagattttctggcagatactcagctggacggaacgacggatcttggctgttacagcagcattctggtagatgaagcacatcttctgtccctggaaaaattatcggttctgcttacatggagtgagcacaggccggtgatcttttccagtgattccgaggatgtgatctcaccggaagagatggatcgtagcattgtggaaagcctgggaaatctgtcggagatccagaaattccatctgacaaaccgaatccgtaccaatgcggaactttcctcttttatccagaacatgatgcacctgccggaaaaaagaagccccagatggtatccgcatattgcagtggtgtatgccaataatgaccgcgaggtggaaaattttctgaatgattttgcgggacagggatatcagcagcggatgccagagggttctggacagcttggtatccaggcagtgagagatgcggagaagatcgttgtattgctggatgaacagtattattacgacgaaaaaggatatttaagatccaggtgctccgcggaaaaatattccagtgtacgaaaactttttcatcttttgaatcaggcgaaagagagcctggctctggtggtgagagagaatatggcggtatatgaagtgatgatggagattttgcagatgcacagaaacagataaaaacaaaagattaaagacaatggagaggaagacagagagatggaagttttggagattgttttgcctgtactggcgatgatcattcttggaatcctgtgcagaaaatggaaacttttagatcagagtggtgtcaataacatgaaaacactggtaacaaatattatgcttcctgtggcaatttttcatgcactggcaacagcagagtacagtggaaagatcggaattctggttctgatcatgtttgtgatgctcttgatttcatttggggcaggattctggatgaaaagatttatggacgagccatataagaaatatcttccgtttctgatttgtatctatgaaggtggaatgatggcttacccgttgtatacaagtctttgtggcagcgaaaatctttcacagattgcagtgctggatattgcgggacttctttttggattcagtgtgtatatgggaatgttgggacagacggaaaacggggaaaagatcaatgcaaaaagcctgttttacagtgcattgcgaacccctgcttttataggaacggttcttggaattattgtgggactgacacgaatgatcacccggcttctggacagtccttttggcaattgttatctcagtgtggagaatattctgacaacggccattacgccgattattcttattgtagttgggtacagtatggaacttgcgccggaacttatcagcccctgcctcaaaaccatattgctgagagtccttttgcaggcagtgatgattgcgggagttctcatggcagtaaaatatttggtaggaggttccaggcttctgaacctggcggttattacatatatgtcctcgcctgctacattcagtatgcagacttttctgagaaagaaagagagcagtgcttatgcatccacaacaaattctctgtattgtgtggtctcaatcctggtttatatcacactggcagtggcaggatgatggaactgaaagaagggatcaaatgacgacaacgacattatgttatatagaaaacgatgataaattcctgatgcttcacagagtaaaaaaacaggatgatatgaatgagggcaaatggatcggcgttggcgggcatgtggaaagtcaggaaactccggaagaatgccttgttcgtgaggtgaaagaggaaacagggctgacacttacctcctataagttccgtggcctggtgacatttataaacagtgaatgcgaatcagaacttatgtgtgtgttcacggccgatgaatatacaggagaactgattgaatgtgatgagggagaactttgctgggttgacaaagccatggtgccgaatcttccggcatgggagggggatcaggtatttcttgatctgctcctttcaggagaaaaacgctttttttctgtaaaattgcagtatgaaggtgacagacttgtagagaagaaaattcatttgtattaatagtagattgtttcatagctggaggggaaatcatgtttaataaaatgattgcacagcaaaccgcaaaaaaagaaaaacttcttgataattttctgaaaaaacatgaagcggaatatccgtttccggaagatgtggaactcatttgtgacattgactatatgggagatggaaagccctgtcatttcatggatatttaccgtccccgaaaaattatgaaggttcttctctcctatatttacgggaaacactggaaaaagagttcgttttatccatatataaatccggaaaacaaagaaattatccgaaacctgccaccgtcatttctggtcacagcttatggagatacttttcgaaattacagcagacagtatgcaaaagcgataaaaaagccggtgtgatctgtcatcttgaagattatgaggtggacaaaaaacttccgcatgcttttagtacaacttttcctgaaatggaggaaagtaaacgtgcaaatacgcagatggtggaatttctttttaaatactgatgaaatgccaggaaaccttactggagtccggatccggattattctccctgcacaaggatgcaatcgctatatacagttaagaacacaattttcttgaaatcctaaccatagatgattataatagggagaaggtatgtcaattttgtgctattagtgatatttggcattgcattgtattttaatatacaaaatgccatttttctttacgataagttcgcgaaaatccgcaggatattaactgtttgagggtaatgataactgttgttggcaagttgaaaaaatgtccatttttgaccaaacggggttttgggcaccattttatagcaactttttacacaagaattggcttacaaatataaacatttttgatgtttcactgaattttatatctttaaattctttgtgaaatattaccaattttagaaaggaatagaatgagaaaattagcattaagtgatgaaattttgctcaaagttgacaaagctgcccgctatattggcggcgaagtcaactctgtaatgaaagataaaaatgaggtagaaattcgtttcgcaatgtgcttcccggatgtctacgagatcggcatgtcaaacctgggcatgatgatcctctataacatgttcaaccagcgtgaggacgtatggtgtgagcgcctcttttctccatggccggatctggataaggtgatgagggagaagaagattccgttgtttgcactggaatcccaggagcccatccgggattttgattttctcggaattacgatcgggtacgagatgtgctacaccaatatccttcaggtactggatctcagtggtatcccgctgaaaagcgcagaccgtggtgaggatttccctattgtgatcggtggcggtgcctgtgcgtataatccggagccgttggcacctttttttgatatgttttatatcggagaaggggaaactgtttatgatgcactttttgatgcatacaaggccaataaaaaggctggcggcagcaggagagatttccttctggcagcagctaagattcctggaatttatgttccgtctctctatgaagttacctataaagaagatggtacgatcgcatcctttgcgccaacagaggctggcgttccggaaaaagtccagaaacagctgattatagatatggagaaggaataccgtgcagtggaagcaccggttgttccacatattaaagctacacaggatcgtgtaactctggaaatccagcgaggatgtatccgtggatgtcgtttctgccaggcaggaatgatctaccgtccgacccgtgaacgtgatgtggagactttgaaggaatcggcgcgtatcatgctgaaaaatacaggacacgaagagatttcccttagttccttaagctccagtgactattcccagctgaaagaactggtgaatttcctgatcgaggaattccacggaaaagcaatcaacatttccctgccgtctcttcgaattgatgcttttgcgctggatgttatgagtaaagtgcaggatgtaaagaaaagcagcctgacttttgctccggaggccggttctcagcgacttcgtgacgttatcaacaaaggtctgacagaggaagtgatcctccatggtgcgggcgaagcattcaagggtggctggaatcaggtgaagctttactttatgctcggtcttcccacagaaacagaagacgatatgaagggaattgctcatctggcacagaagatcgcagagacctattatgaggtagttccgaaagaacagcgtaaaggcaaggtacagatcaacgtcagcacatctttctttgtgccgaagccgtttaccccatttcagtgggcaccaatgtatacagagcaggattttgtggaaaaagccaaggtggttaaaaatgaagtccgcgcccagctgaatcagagaagtatccgttataactggcatgaaccggatgtaacagctctggaaggatttctcgcacgcggggacagacgatgcgcggatgtgatcctgaaggcttatgaaaaaggtgccctttacgatgcctggacagaaaattttgattatgatatctggaaggaagctatggctgaatgcggagtggatatgacattctacacacttcgtgaaagaagcctggatgagatccttccatgggatttcattgataccggtgtcagccgcagattcctggagcgtgaatggcagcgtgcaaaagagggtgttgtgacggaaaactgccgtcagaaatgttccgcatgtggagctatgaaatttaaaggaggtgtctgccttgaaggtaagaattaaattcagcaaagagggtcctatgaagtttgtgggacatctggataccatgcgttatttccagaaagcacttcgtcgtgcagagcttccggtagcgttttccggtggatacagcccgcatatgatcatgtcttttgcggttccacttggagtggggatggagagtctcggagattattttgacctggaaatggcagaagatatgcctactgcagagatcgcagcccgtctggaggaacagatggcagaggggatgcatatcgttagcgtccgcaaggtagaggatggaaaagcgggtaaagcgatggcactggtggcagcagcagattatcttgtggaattccgtccgggcaaagagccttctattgactggaaaagccgtgtgaaagaatttctggcacagccggagatcaaagtgaccaagcagaccaagcgcagcgaaaaggagatcgatcttcgtccgaatatctataaaatggaagtaagagagaatgggttcttttatatgctggcatctgcaagctctaattatacgaagccggagatggtaacaaacacatttttccactggattggagaagaacttccggaatttgcctttacagtgaaacgtctggaaatgtatgccgataaaggagaaaatgcaagcccacgttttgtgactctggaatcattaggtgaggaaattgagtaaactgatcataacaagaatggagatccatggtgtgccctgtacagtagcggctctttcggaggaggaacggatcgttgagatccgactggaatccgatcaggaaaaatccattcttggaaatatatataccggacaggtcgaaaatatcgcatccaatatccaggcggcttttgtgcagatcgagcctggaaagagatgctactattctcttgcagaggcacagagagctgttttttccgcaggaagaaaaggaaacggaccattgcggcctggagatgagctcctggtacaggtgagcagggatgccatgaagggaaaacttccggcactgacatccaatctgaattttacgggaagatatcttgttctcactacaggcgataaaaagtttggtctgtcttccaagctggcactggaagatcgccatcgcctcagcggatggctgaaagaggaagcagagcgtccggataaggaattcggtatcattgtccggaccaatgccgcagacgcttccaaagaagagatcctgaaggaactggagtggctgaagggccgctaccataaagccgtagttcagggacggaaccgtacctgtttcagtcttgtactggagacagaaccattttatgtggctgctgtgagggatgcttatggtcgtgacctggatgagatcattaccgatgtgccggaaatcagagaaatgatcctgggatatctggaagagatcagcccggagcttaaagaaaagcttcgtttttatcaggacaaacttcttccgctttataagctgtatcgcgtggaaactgcactggatgcgatccagaaagaaaaggtatggctgaacagcggcggatttctggtgatccagcagacggaggcctttgtatccattgatgtaaacagtggaaaatataccggaaagaagaaaatggaagaaaccttccgcaagatcaatctggaagcggctgcggagatcggccggcagttacggctgcgtaatctttcaggtattatcctgatcgattttatcaacatggaaaatccggatcacagagatgaactctttcatgttttacagaagctcctcagaaaagatccggtaaagagcagggctattgatatcacaccattgcatatcttggaaatgaccagaaagaaagtaagacgtccggtgatcgaggacattcgtgagcttacaaaaaaataataaaaatatcaaaaaaactattgacataacagtatgtcactgttatgataatcgagtatgccgcacaaagaggttaaagagcttcagtttcagaacaggagccaccgaatttggcgagtaaataattaggaggtgccacagatgtacgcaattattgcaacaggtggtaaacagtacaaggttgccgagggtgacgtaattaaagttgaaaagctcggtgtagaagctggtgaaaccgtaacatttgacaacgtgatcgcagtcagcaatgacggattaaaggttggcgaggatgtaaaagatgccagtgttaccgcttctgtagttgaaaacggtaagaatcgcaaggtcatcgtttacaaatacaaacgcaaaactggatatcacaagaaaaacggacatagacagcagtacaccaaagttaagatcgaaaagattaacggttaatctggtgtcatcatgattacaattaaagtcagaaagaaaaacggatcttacgaagaatttatttcgaagggacatgccggttatgcagaagccggacaggatattgtctgtgctgcggtatctgcactgatcattaccacggtgaattctcttgagaaattcacagatgataaatttgatgtgcaggaaaaggatggatttgtttccattcatttcagaaatgatctttctgaacgggggatgctccttatggattccttacttctcggtctgacggaaattgctggtagttataacaatcgatatttgacagtaaaagtcaaggaggtgtaacaacaatgatgaagatgaaccttcagttattcgcacataaaaagggagttggttctacaaagaacggtcgtgattccgagtctaagagattaggtgcgaaaagagcagacggacagtttgtaaaagccggaaacattctttacagacagcgcggaaccaagattcacccaggtgaaaacgtaggctgcggtaaagactatactttatttgcacttacagacggagtcgtaagattcacaagaaaaggtcgcgataagaaacaggtttctatcgttcctgtagacgcagagtaatgaaataggtaaaaggcttcaaatcgatccggtttggagcctttttttggaatagaggtgtaatatgtttgcagatagagcaaggatcattatccgctccggtaaaggcggcgacggacatgtaagcttccgacgtgagctgtatgtacccaatggcgggccggatggcggcgatggtggccgtggcggtgatgtgatttttgagatcgacgagggccagaatactctcggagactacagacacagaagaaaatataaagctgaggatggccaggaaggcggtaaaaaacgctgccatggtgcagacggtaaggatgtggtcctgaaggttccggaaggtacggtgatcatggatgcggaatccggcaaggtcatcgcggatatgtccggtgagaatcgtagacaggtcgtattaaaaggcggtcgtggtggaaaaggcaatcagcactatgcaacagctaccatgcaggtaccgaaatatgcccagcctggacagccggctcaggaacttgaggttctccttgagcttaaagtgatcgcagatgtcggtctggtaggatttccgaatgttggtaaatctactttcctttcccgtgtgacaaatgcacagccgaagatcgccaactatcattttacaacattgagccctaatcttggcgttgtagatactgataacggcggctttgttatcgctgatatcccgggactgatcgagggtgcatcagaaggtgtgggacttggacatgaattcctccgtcatattgagcgtacacgagttatcatccacattgtagatgccgcttccgtagaaggtcgtgatccagtggaggatatccacaagatcaataaagaactggaggtctacaatccggaaattgcagcaagaccgcaggtgatcgcagccaacaagattgactgtatttttgatgatggcgaagaaagccctattgatcaactgaaagcagaatttgagccacagggtatttcggtttatccaatctcagccgttaccgggcagggtgtcagagaactccttttccatgtgaaagagcttctggataagagcccgatgaaaccggtagtgtttgaacaggaattcttcccggaagatgttcttgtaaatgaaaatcttccgtttactgtggagcgcagcgaggaagatccggaagtattccttgtggaaggtcctaagattgaaaaaatgcttggctatacaaatctggattctgagaagggatttgccttcttccagaaattcctgaaagagggcggtatcctggaggaactggaaaaagccggtatccaggaaggcgatacggttcgtatgtatggctttgattttgattattataaataagaggtatgacaatgacaagtaagcagagagcatatttaaaaggccttgccatgacaatggatccgatccttcagcttggcaagggtggtcttactcctgaaaataccgctgctgttgaggaagctcttgcagcaagagagctgatcaagatcagcgttcttcagaactgtctggaggatccacgtgaaatggcacaggttcttgcagagagaacaagatctcaggtagtacaggtgatcggtaaaaagatcgttctctacagagaaggtaaaaaggacaagaaaaaaatcattcttccgtaatctcgggaggttataaatgagcaaagcaacaaaaaaaataggaatcatgggtggtacttttgatcccattcatatggggcatttgatcctgggagaaaaagcctatgaacagcttgagcttgataaagttttgttcatgccctgcggaaatccacctcataaacggaaccgtaagggcagagcgactgatgaacagcgtgcggaaatggtccgtcttgccatagaggataatcctcactttgagctgtctctgatcgagatgcatgaggaaggctatacgtatacttaccggactctggaacagctgaataaagcgaatccggacacagagtattattttatcatcggtgcagattcgctttttaattttgatacctggatggaaccggaacgcatttgtcaggaagcagtactggtagtggcaaccagagatcatactccattgaaggaacttgatcagcagatgcaacttctgtcacagaagtataacgggaattttattcgactggataccatgaatattgatgtttccagtgagctgctccgttcctggcatgaaagcgggcagagtctccgctattatgttcccaagcctgtgatttcctatattgagaaaaacgatatctataaaggaaatgattcagatgggaaaatatgattttattaagataaaaaagaaactttccaaatatctggatgaggccagatttgagcatacaatgggggttatgtacacttgtgctgcgcttgccatggtttatgattatgatctggaggatgcacaggctgcaggacttcttcatgacagtgcaaagtgtattcctaataaaaagaaactgaagctgtgcagccagcatgatattccggtatcagattttgaaaaggatcatccgtttcttcttcatgccaaactgggggcttatgtggccagcagtaaatatgatattaaagacgaagagatcctgacagcgatcacttatcatacaacaggaagaccgggaatgagccttcttgagaagatcgtatatatttcagattatattgaaccaatgcgtgacaaagctccgaatcttgcgaaggtgcgaaagattgcttttgaagatctggatgagtgtatgtatgagattttaaaggatacactggaatatctggaggaaaatcccaaggaaatcgacagtacgactagggatgcttatgtttattataaagaactccatgacagaaaaatgcaggatgcagccaacagacaggaggattaaaattctatgagtatcgaaaaagagatggtccggatcgcctgcaaggcactggatgataaaaaagcaaaggatatcaagattattgatatccatgaggtttccgtgatcgcagattattttgtgattgcaagtgcttccaaccagaatcaggtacaggcaatggttgacaatgcagatgaaatgcttggccgtgccggatatgaagcaaaacagatcgagggaaccagaaactccagctgggtcctcatggattacggtgatatgatcatccatatctttgatgaggaaaacagacttttctacgatcttgagaggatttggagagacggcaagattcttgatgcggaagaatttcttggtgagaattgtacagaagtaactagcatttttctataatttgtaaaaacaattattctgtagcaaaccaaccaacaaaacgaagcgtattactggcaaaaccggtgatacgcttttttaatggaggcaaaatgaaaaaatttaaagctaaaatctacctaaaaaacaaaaaagaattaaatgaatacctaaaaaatctcgtaaaaataaagaaaaaccctactttagaagatgtgaaattttcatttaagtggggaacaatcccttgtgaccaataactaccatttggaaatatcagggaaaaagaagatgtggaggaaatataattataaataacgaaatacctaaaacaattccggtcgcagactatgccggatatattatgaaaaattttaaaccggatgtcataaaattcaaaaagcctgaatcagaatggacagaagaagaacatacagaatatacaaagtggagtcttaaactgtctatggcacatagattcaagcaacaaatacaggagaataaacccttaacaaatagggacaaaaggattatagagcgttttagaagtggcgcagatttctttggcgaaaaaatatgtggcaaagaaacatcaagactattcgaacaaccatatacttttgatctatttgatgagtggcaggaaaagcactttaaagaacacccggaagacaaagataaaacaatcgaagagttatttgacatacggctttctgaacagaagctatatcattacaaagaagtaaacggcaaatattatggtgcagaaatcccaaaagaaatacattacacagaatatttccgatatctatatttcaatgtaaagtatgaatttagtgagaaaacatattacagatctatcccatatacagacaaggataagcaagaaagtatatgggatagggaacgctgcttcgttgcacaagagatcagtgaatggagagtggacgaactagaagattggcagcgagatcttatcgaaaaaataagagtcggtgttgagctaaaagacgatgatattgttaaagcaatgggttattaaaatctaaatcatgagcctctttaatcgaggaattcaacgatttatgataacaacaacaagttccaaactaaataaaattctgattttatttagactactaatcgtctgaaacaagcaaatattgcttaaaacagaggataacgatttttacgaaaaacagaaaaatcatgtttgcgaaatgataagaatgagtaaaatttgttatattagtttactgtaaaaatattatgtgaactaaataagaagaaatcaaaaagcagaagttttctgttgaaaaagaaaagagagatatctttgtggggctgtacagctaccttaaagatatctctctttttaaatcacattacattgggtgggatctgttgtttatattttcatgaaaagaaacgaaatacaccaaatactttgccgaggatctgcagattaccggtgatgatgatcggttccatattgtcgttctccggctgaagtcgataataaccattttctttgtagaaagtcttaactgttgcagaatcatcgatcagagcaactaccatgtcgccgttttctgctgttgcctgctgctttacaagaacctgatctccatcaaaaatacctgcattgatcatactgtcgcctttgacagtcagcatgaaactttgttcattgggcatatattcagccgggatcggaaagtaagcatcgatattttccactgccaggatcggctgtccggcagcaacagtgcctacaagaggaacattgacaacctcgcggcggaccagattgaaattatcatcaatgatctcgatcgcacggggcttggtggcatctctgcggatatatccgtttttttccagagcttccagatgggagtgaacggaagatgtggatttcaggtttactgcttcacagatttcacggacggagggcggaaaacctctgttaaggatctcatttttcatataatccagtatttcctgctgctttttactgattctgccatatgtcatgtgtacttacctccctgggttgattttatctgctgtcgaccataatatgacagcatcacgaaattatattttgaatagtataacatacttttgaaaaaatggcaaacggatattcggaaagtatgttcgcacgttttaaagcttgtattcatttaaataaaatgttacaataaaacgaactttaagagatgaacgatgtaaaggaggcattcatttgccggataataaagtacattccggaaaaactccgggattcttagcaaagcttcgtaaaatttttggtctgaacattggaactgtaatgttcggagcaatttttatctatatgatctttagtgtgattctttatcttacagcttctcatatggaatcttatcaggttccctccggtccgttatccatgaatgagacatacacagggctggcgatcatgacagagaacgtagtgcaggcagatgcgggcggttacgttacatattacgcaagggaaggtaccaagatcaatgccaacggtgctgtctacagcctgaacagttcaagatctgcagacaatgtaacctctctgagcagagaggaactggcggatatacgcagtaatatgcaaagcttttccaaaggatttgatcccagcaaattcaacagtgcctatagttttaaatatcagctcaatggaagcatccttcagtatgcttcagacagttcgggagcttcttctgcaagcacgacgtctgaagatggagaggaagccacagttacaacaatagtttccagtgatccgaatatccgccgtgcgcagacagacgggatcatcctgtattctacagatggctacgaaaccaaaaccgttgataatgtcacagctgctgattttgatcagaattcctatcaggaaacggatctgaaaacagatggacagataaaggccggagatgatatttatacgatcattacagatgaacgctggagtcttttgattcctttaagtgagaagcaggctgctaatctgaaggagcgtacatcgatccgtgtcaagttcctgaaagatgatctgacgcagacaggagacttttcgatcatggagatcgatggggctaaatacggtaagattgattttaataagggactgatccgatatgcgtcagaccggtttctggaaatagaacttgtcacgaacaatgtgacaggtttaaagatcccgttatcttctatcgtaacgaaggagttttatgcaataccttccaaatatcttacgacggatgatgaaacacagcaatccggatttatgctttccggaagaaataaaaaaggcgacagtacgacaacctttgtcagtgccggtatctatggccgtgatgagatcacagacaaagaaacacaggaaacaagctatatttattacgtagacaagaataaatttaaagaaggcgatgctcttgttgagccggatagtggagagaagtttatcattggagatacagaagttctggagggagttttctgtgtcaatcagggatatgcggtattccgccggatcgagatcctggatgaaaatgaggaatatgcggttgtatcaaaggaaacctataatgggcttgtccgatatgaccgtattgtgaaaaatgcagataaagtaagtgaacaggatatactttactgattaaaggaggatttatatcatggtagcggaaaatttggcacaggtgcagaaaaatattaatgaatcctgcaataaaattaacagagatccgaatgaagtcacactgatcgcagtaagcaaaaccaaaccggtggagatgctgaaggaggcttatgatgccggagcacgtgtctttggagagaacaaagtgcaggagatcgtggataaatatgatcagatgccttcagatgtcaaatggcatatgatcggacatcttcagcgtaataaagtaaaatatattgtggataaagttgcaatgatccattctgtagattcgcttcgcctggccgagacgattgaaaaagaagcagcgaaaaaagcggttattgttccgatccttatagaagtaaatgtagcgcaggaagaaagtaaatttggtctgaaaccggaagaagttttaccgtttatagaacagatctcagatttttcacacattcagataaaggggctcatgacaattgctccctatgttgataatgcagaggaaaatcgcgaaattttccgtgaacttaagaaattaagtgttgacattgctgctaaaaacattaataatgttactatgagtgttctgagtatgggaatgaccggagattacatggttgccgtgcaggagggcgctacgatggtgcgtgtaggcactggtatttttggtgcaagaaattacgcattataagactaataagattggagatttaaaatgggcgttttagacaagtttttagatgccatcaaactgaacgacgattatgacgatgacgaattgttagatgatagccttcttgaggatgatgacgattatgatgacgatttcctcgatgaagatgatgatatggaagagaaaccaaagaagaaattttttgagaaattttccaagaaaaaaaatgacgaggaagaggattttctggaggatgagccggaagatgaaacggttaaggcacctgttgccaagtcatctgcaaagacagctgcagccaaggccccggcaaggcaggaacgtatttccagaccggcaccttcttccaagattaccccaatgcgtacaagcaagcgttcttcccaggctgcaaatatggaagtttgtgtgatcaagcctacaaccatggaggaagcaagagaaattgcggatacactggtcgataattctaccgtgatcctgaatcttgaaggaatcgatgtggagcttgcacagaggatcatcgattttacttccggtgcatgttattcacttggaggaagccttcagcaggtatccagctatatttttgtacttggaccatataatgtagatattacaggtgatcttcagaatatccttggcggttctgtgccgtctgttagagtgggttattaacctcatggataaagaagaactttttgttaagagaatccgtgaactggcaaatctggcctatcagagagatattaccacatttacggattttcttaatttaaatgaacggaatattttaaacagtcagaattttcataagctgggtgttacagcggaaggttttggcggatatgagaatgcagagcgtcagatggtagcctttcaccctgatgctcttgcttttacatgggattatcccattgattgtatccggcttgagccaaaagcagtgaaattttcagaagatctgacacatcgggattatttgggagcgatcctgaatcttggggttgacaggagtgttgttggggatattcttatagaagatcatactgcgagttttttttgtctgcgtcagatgacagatttttttctggagaatctgtgtcgtgtaagacataccacagttgtggcgtcgaagatagaagatccgggtgatcttccgaggccggaactgaaaccagttagtggaacctgtgcgtccgtacgcctggattctctgatcgcactggcttttgggacttccagaagcagtattgtgcattgtattgaagaggggcttgtttttgtaaatggaaaactgatcacatccaatggttatgagcccaaagagggagacatcatatccgttcggaaaaagggacgttttatttatgatggggtatcccgtcagacaaaaaaaggacgtcttggagtacggattctgctttatatctgaacagctaggaggaaaacgcaatgacagcatcaaaattacttgtaaaacgagaaggtgattttcattatcccatctgttttgaagaagatttttctaatctggcacaggttatgaaggaagaaggacttgttgacagaaaaatctgcattgtaacagattctaatgtgggaccactgtatgaagaatctgtaaaacaggttttaagtgaggtaagttccgatatttctgtgtttacctttgaggcaggagaaaaaaacaaaaaccttaataccgtttcggcattgtatcaggccctgatccaaaatggtcttgaccgaaaaagtctgcttgttgcattaggcggtggtgtggtaggcgaccttaccggatttggcgcggcaacttatctcagggggattgacttcattcaggtaccgacaacactgcttgcacaggtagacagcagcgttggcggaaaaaccggcgtagattttcagcagtacaaaaacatggtaggagcttttcaccagccacgtcttgtatatatgaatctaagcactctttcctcgcttccggcagaacagtttgcctgcggaatgggtgagattttaaaaacaggattgatctgtgatggagattttttccgctatgtatgctgtgagcagaaagggatcaaaaagctggatatggaacggattgccagaatggtacgcagatgctgtgagatcaaagcaggcgttgtggagcgtgatcctaaggaacagggagagcgtgcgcttcttaacctgggacatactgtggggcatgcagtagaaaaacttaagaatttcaccctgctccacggacagtgtgtgggagtcggactggtagctgcggcatatctttccatgaaacgaggacttctgaccaaagaagaatatcaggaaatctgccagggatgttcggattacgatcttccggtgcatgtagatggtcttatcccggaagaagttctttccgcaacaaagaaagacaaaaaaatggaacagggacatatcaggtttatcctgatggatggtatcggaaaaagcttgatcgacaaaacagttaccgatgaagaaatgctttcctgtattcaggagataactctatgatcagtcgtgttaaccatcatcagaaaatgtcttttagtaagtgtatgtcgggggacatttttttgctgatcttactcgtggctgcggatcagggagcaaaatggctgtcatatctgtatctgaaaggacaaccatcggtttcgctgattcctggcgtacttgaacttcattatctctatccggaaaacaggggaattgcgtttggaatgtttcagggaagtgtactcttttttgccattgtgagtgtactgtttctgggagtgatcctctatgcatggatccgtattccgaaagagcggttttatctgccgttgctcaccattgctacagtacttgcagctggtgcactgggaaattttatcgatcgttttttcagagggtatgtgatcgattttatctatttctccctgatcgattttccggtatttaatcttgcggatgtttatgtggttgtaagtggaatttttctgatcctgtttgtatgcacgaaatacagagatgatgattttgcgtttctgaatatcaaacagtgatccgggcagagatataatgcatttatctgttcttgtaggagatataaatggaaatatatgattatacagtagaaaaagaagaatcaggtatacgaatcgaccgctatcttgctgagaaagacagcggtctttccaggtctttccttcagaaacttctgaaagaaggacagattaccgtgggagagaaggctgccaaatctaattataaggtccgtgaaaatgacaggatccatctggagatcccggattccagtgagccggatatcgttccggaggatattccgttggatattctttacgaggatgaagatgtactgatcgttaataagcccaaagggatggttgtacatcctgcagccgggcattatcagggaacactggtcaatgcagttatggcacattgtggtgacagcctttccggtattaacggagtgatgcggcctggaattgtccacagaattgataaggataccaccggggcactgttggtatgcaaaaatgatattgctcaccgggatctggcagaacagctgaaatgtcacagtatccgcagacgctaccgggcagttgtgcagggaaatctgaaagaggatgagggaaccatagagggacctattggacggcatccgacagatcgtaaaaaaatggccatcaatcataaaaatggtaaagatgcaataacacattacaaagtgctggaacgttttggcgaggccacgtatgtggaatgtcgtcttgaaacaggtcgtacccaccagatccgtgtgcacatggccagtatcggacatccgcttcttggggacacggtgtatggttcatccagaaatccctatcatctggagggacaggcacttcatgcaatgatccttggatttgttcatccacgtaccggggaatatatggaatttacagccccacttccggaatattttgttaaattgctgacaaaattgcgaaaatagctggaaaacttgtggaatatagtgtataataactatattaaagaggaagcggagttaatatttgcaaattcgctgaatctgagcagaaaggatgtggctgttatgagtaacaatacaacaagttctattattactatcggtcgtaaatatggcagcgccggaagacagatcggccaggaagttgctaaatattttggaatcaaatgctatgataaagagctgctggagcacgcagccaatgacagtgggatctgcaaggagctgtttgagcatcatgatgagaagccaacaaacagttttctttattctcttgtaatggatacttattcatttgggtattcctcagccggatttacagacatgcctatgaaccataagatttttcttgcacagtttgaggcaatcaagaagctggcttcagaaggtccctgtgtaatggtcggcagatgtgcggattatgcacttgcagataatccggattgtttcagtgtatttgttcatgcaaaccttgactggcgtatcaaccgtattgctcagaaatacaataaaaatgctaaagaggccaaggacatgatcaacaaaacagacaaaagccgttccagctactataattattataccaacaagaaatggggatctgcggacagctataatctttgtctggatagcagcaagcttggcattgatggaactgcgaaggcaattatcgaagccattcacatttatgacagcctgaaaaaataaacatcagatttttaggcaccctgccattttatggcggggtgttttctgtatcagcgcgataccctgaagtcggaatttatctttgcaggttattggaaaataatgtttatgttttttttagacacaaaccagagatgctatgttataatcacctggtggaggaaattactatgaaaattcgttggaaccatcgttatgtgcagttaggtgtgactgcatttctggttattgctgccagtattttattttattacgggattttccatatgaaatctctgatcaccggaattaaaacatttttcggtattatggcgccgatcatttacggagctgccatagcatatctgctaacccccattgttaattttctggagcggaagatcatttttccgatttttgaaaaaaggaataaagcacttcagaaaaaggggaggaaagtagtacgctggatctgtgtgatcctttctgtatttcttatgtttctggtcatttatgcccttgtcatgatgatccttcctcaattgattcgaagcatcatgaatattatctacagttttcctcattacgtaagtgtagtggaaaactggttaaattccgtcgtggaaaagggatggaaactgaatccggatatgatcagccagatcaatcagtattccagcagattacaggagtatctgacaaatacgatccttccccagatgcagtttatgatgaaaaatatatccgcaagctttctggatcttcttgtttttctgaagaatttccttattggagcgatcgtatctctttatatactggcggataaagagggatttgttgccaaggcaaaaatggctgtttatgcagttcttccaaccaaatgggcaacctttcttgttcattccatgcgttttacgcataaaacctttggtggatttatcagcggaaagatcctggattccgcaattatcggtgtattgtgttatgttggaacatcgatcatcggaaccccatatgcgattctggtcagtgtgatcgtcggtgttacaaatgttattccgtttttcgggccatatctgggagcagttccgtgttttcttcttattttgctggtagatcccattcagagcttgtatttcctgatctttattttgatccttcagcagtttgacggaaatatccttggaccaaagatcctgggtgagtcgaccggactgtccagctttatggttattgttgcaatcatggtcggtggtggtttatttggagttccgggaatgatcgttggagttccggtatttgctgtgctgaatgctgctgtatggaagctgatcggacgtagtcttgatgaaaaagatatgtctgcagatgctgagttttatagagatattgattgtgtagaccccgtttccggaaaggtcctgccaatgccggtgaaaaaatctgtatcaaaagcacaggaagttacagtaaaagcggaaaaaaacagaatctggtccggggcttgggatgaaattaaacgaatgtttacatttttagttaaatttattcaggcgaaatatataggctttcgattgaagcagaaaaacagacggagacggaggaagaacaggttatgaaatttgtaattcagcgtgtaaatcatgcagaagtcaaagtggacggagaaattgtcggaaaaatcggaaaagggtttcttgttctgatcggcgttggccgtgaggacaccaaagaggatgcagactggtatctgaaaaagcttctgggacttcgtatttttgaggatgaaaatggaaagaccaatttgtccttggcggatgtaaacggggaattgcttttggtttcacagtttaccttatatgcaaactgccgtaagggaaaccgtccaagctttatagaagccggtgcaccggatgaagcaaataaattatatgaatatattatttcggaagccagtaaacaggttccggttgtagaacatggaatttttggtgcagatatgaaagtatctttggaaaatgacggaccgtttaccgttatttttgatgaaagcctcagagggtaacgacaaataataataaaaagtgcttccataaggaggcactttatttacttgaaaatttatcaaaaacaggcaattttgtaggaagtagctgtttatactacccatctatttgaaaaactcgggtttgtcgtatagatatagatgagtgtaaaaccacttcttttaacaggtgtttcaggtatttcctgcaaatttatatattaaggagtttttatggataacaaaattacttaccacgaacaaaatgacattgacaatactttaaaactccgtgaggttttaaaaacgcttccgccattttgcagggattatttccgggctattgatgcaacgactacaaccaagaccagaatttcctatgcatatgacattcgtatatttttccagtttttactggagcaaaatccaatgttcaaagacaaaaccatgtcggatttcacagttgatgttctggatcaggtcaaggctgttgatcttgaggaatatgaagaatttctcaaagtttataaatccgcggactcttccaaaacggaaacaaatggtgaacgtggcgtcaaacgtaaaatttctgctttaagaagtttttatgcttactattataaacatgaaatgatcaccaccaacccgtctgttctgatcgatgtgcccaagatccatgataagaatattattcgtctggatacagatgaggttgccatgctgctggattatattgagcattgcggagatacgctgaccgggcagaaacggatgtaccatgaaaaaacgaaggacagagatcttgctattgttactctccttcttggtaccgggatccgagtatcggaatgtgtcggactggatgttgaggatgtagacttcaaaaacaatggaatcaaagttacccgaaaaggcggaaatgaaatggttgtatactttggtcctgaagtagaaaaagcattgaagaaatatctggaagtcagggagaatattacgcctctggcaggccatgagcacgctctcttctattctacccaacgtcgccggatcggtgttcaggctatcgagaatctggttaaaaaatatgccagggagatcacaactacaaaaaagatcaccccgcataagcttcgcagcacctatggtactgccctgtaccaggaaaccggtgatatttaccttgtagcggatgttttgggtcataaggatgtcaatactactaagaagcattatgcggctctggatgatgccagacggcgtcaggcggccaaggcggtacgtcttcgcgaggactgatgaataatgggactgcggagcaactgattcgtttgacatgcattgcatataaatatagagacagttagttcacataatataaattatgtaaatcaactgcctctatatatttaatcagatcaagaaaatctcaaattccctgtagggttcaaaaaaccttaagcagtgattatggacatctgtattatatccatgacccaaaatcaaaatccgtacttaacttatttatcaaaatctgtctcgaatacaccctccggagtacgcatggtaagaacacccagattaaattcactgtccataattgagatatgatattcaaagatcacatcatcatcaaatttggaaagcagcacatagcttccattctctttcccatcgatctgatcgcagatgtcgtcgtaaacgtcctctccggaaatctttcgcgggtatccgcttgctttgatcttctcttcgatcgctttatataattcttccatactttatcccatatcctttctgatattaatttgctgataaaccagatatgtttttatcataccagatttatcggcaaaaatcagcaaatatttggttgtttctgataaagtttcagatagagataccgattataggatttgctgcatatgaaggattttatttcttttcgtaaaggaattcttccggcaaagttactttgaaatcttttgcaagagcacggaagtcattcggtgtgatggtctgcagtttctgcggagccatggataagatcttaaccaggatctctgcggatttttcaacggtatgaagaagtccgaaggtcaggtcaaaatcctcgcctgagcagaacataccatgatgcgcccagataaccacatcatattttttcatcagttcagcggttttgatcgcgatttctcttccacctggaaccatccatccgataactcccacaccatccggaaatactaccggacactctgttgcagattcccagagttcacgggtgaatactttgtcatccagaggaagaacaaaggtaagtgcaatggtattggtggtatgtgcatggtaaataacacgatgtttaccgttggtaagctttttctttacttcatggttcatcagatgagttgggagctcgctggtcggtcttcctccctctacaagaccccagcggatacggtaatttgttcctgtctcgtcaagctcaatgatcgcaagacatacttccgggtcaacgatgatattacggaagtattttccgcttcctgttaccaggaaaaactctctggcaagtcccggaacctcaacaccgataggggtccattctcctggcgcgttcagtcgtggacggatcatctctacttcttctgctttcagacgataacttaagtttccaccgtttctctcgtgccatccctgctgatatccatcgtctgccattttgataaagccctgtacgaatttagattcaagaattttcataatatatttcctccgtgtttaaatgtggtttattgttgggtttgcgattgcttcaatatgctttcttgttgtttgtactttattatatgcccgattatgtggatttgtaaagagcttttttgaaaaaatatcaataaatccacatgtaaaatgcaaaaaatcttgtaaacattcaataaaccacataaaaataaacataaagcaacaaaaaacacgagtggtcaatagtaatgacatgtacattgaatgtggtttgatgttgctttgtgatgtgggatttatagtatggtagataaacttggaacgccgaagaattgtaagaaaagaaaaaacaggaacatttccgtattctgtaccttagatactcacacgaaaatattcctgctggtttaaaaaagatttttatttaattttttcggaagcatactgagataagaagtctgtacagtgtccgacatgtgatatcccaatatggcaagcagatcttccattttggataaaatttctttccgctcactttcctgctctgcgatcacctcaagctccaaaaagtctccaagtccctctacctgatccagacaggcggtaaatctgccacatttcatatactttcgcgttttcatgacagacgctaccggagaaaaatccaaatggatgagaatatttttaagcacttctgcatcggatacttctgtttccagttccattcgggacatggagattttatctagtttgggtcccttaaaattaatctgagtcttagaaataccggatctgcagtctgtgcttgttcggatacgcagtgcttcatcacgtttttttacatcatgatagacactgttaaaataggtatctttttcctggatctgtgctgtctcctgaaatccctgatctgtcagaaatttcagggtttccttaagattctttaatggaagcttgatctcaatttcaaactgggccatgtgattacttcagaatttctgcttttttgttcagaagtgcttcgcaggctgcacatgctgggcagtcacagtattttgcgccggaagctttgatctcctcagcatgagccaggatcttttttgcgtcatctgcgccaaatacctgtgcgcccatgtcagaacctgcaaaagagatcagtccgtcgatgggcatgatatctgcttccagctcttttacgtaagcagttgccgcatctgcttctttctcagttcctgccgcatccagataattctgtgccgcttcttttacttctttgcatgcagatggtgcctgaagaagatcctgtgttaattctttaattgtttttgccatgataatttctcccttctgatcatagcactcccagaaattactgcatcaagttcagctgtgcagaacatgaatggttggaagtgctataataacagataaaatctgcctgttatgtattgataacaatatcataccacaaccctggattatttgcagaaaatattgagacgttttttataaaggcatgcaggaacaaccgattcccagtccgtccgggccaatatggcaggaaagtccaagggaaagatcatcacacatcacatccattcccggaaagctttcccggatctgtgagatccagtctgcggtaacttccgcagtgctgctggaggcagccataagatatacttttccggcatcatattcttttttgaaagttgtttccaattctctgtgcatagcatcgatcatggcttttcttgattttttcatgcctctgcatttctggaaaacatccagtttaccggttccaaatttcataaccggtttgatattgagaagatttgcggccagtgctgtggtggtattgatacggcctccctttttcagatattccagtgtgcttaatccgacatagatcacggttttttcacgggaagcttccagaatatccttgatctgcggtgctgtatatccatcttccaccaggtctatcgcatccagaatggaacggtgaaggggtgtggaaacacgcccgttatctaccacatacactttgttttcgtattttggttcctgagacaaggcggcagcagtcatgcaggaaccgcttaaactactgctcaacggaatgtagaggatctgatcataagataaaagcatttcgtcccacatttccataacttcctgtggggaaggctgtgaagttgaaacatctgctccttcacgcagcttctcataaaatcctgttctggaaaaatccaggtcttcatgaaacagttctccattcagataaaaaggcatgggaaggacatgaatatccagttcctctgcttcttgttttaaaatgccactgtggctgtcagccatgattccaatttttttcattttccatttatctcctgcgtaatttatgaatgtgtttcgcaacgcggttcttttttataaagagctacactttcacggaagcgttttttgttcagctcccgcatctgggaaacctcgtttttctttacgaaaccatgactttccataaaggttctttgatccagctggtccatatatatggaataatccgtatccttctctattgaaatctgtttgagaagcccggtaccgattccgtttctacggtaatctttgcttacataaagaaagaggatatttccgggagtcggtttctccggggaaacagtcaattgttttttcatatcctgaagtttgttaaaatgctccagattcttccggccttccttagtaaacttcaggcgcaggaaatgatagccttttttcaaacggaaaaccggggcaaaatggccatgagattctttaccggtaatgagcaccccaactacctgatcacggtaggttgccacggtaacgctatctctgtatatcatataggtgtaaaagaaaagtctggtcagatgtttttcggtatgtgtttcctcaaactcccagcggtctttataatttcttcggataaattcccggattattgaaaaatcttccttttctgctttccggtaggcaggtgctttttttaataacatagtccatatctcctgtattttttcataaataactatcctatactttaaaagatgatctgcaacttaacatcaactgtttctcaacaattgttgaagtttatgaaaaagtttatataaataaaaaacaacggaagaacctcatgaaaaataaggtgtccgctgttttttggttttatggatatgtgtaaaatatttgttttacagtataacagtaaaacgacagccgcttccgggaatattttccacggaaacggttcccttacacaggttcaggatctgttttacaagggcaagtccaagaccgtttccctcctgtttatgggaactgtcgccctggtaaaatttgtcaaagatatgtttcatggagtattcactgatctgggggccttcgttttctatggaaaaacgaatcttttctccttccggcatcatccggatatagatcgtaccaccacagggactgaatttgatagcattggaaagcagattgtcccatacatgacagatgagattttcgtttccaagatactccacatccatcatgtccacatcaaattcaatttctttttctgaccatttcggttccatcataacaatggattgtcggatctgctcatccagacggtaccagttctgacgggtctggatcgactggtgttcgatcttggacagcaacaggatatttcctgccaggtgggaaagccttctggtgttaaaaaggattttgctgatgtactgctcctgctcttctgatatagacatgtcatcatcctgcagcagagttgcataaccctcaatagcactgatgggagttttgaattcgtgggaaacattggaaacaaagtctgtctgcagaatctccgttgcttccagttcctggaccatcaggttgaaattagaataaatatcccggatttccttcatttgcttttccgtttccagtcggacggaaaaatcgccttcagcaacctgttgcatggcttttttcagctttagtacaggaccgaaataccggatactgagaaagttgttaaggacaccccctgcggtcacgctggccaggatgatccatacgatgttcggaacagctgaaatatgcagtacatccataacaagccaggatatcagagatacacagacaagctccaacatgatcataaagataaaacgtaaacgaatgcttaaatttatgaagagtttctttttcatgcctttaccaccttatatccaactccacggatcgtcacgatcttaaaatccggattatcgcgaaagcgttcccgaagccttccaatgtggacatctactgtgtgggcatcgcttgcggaatcatatccccagatatcatccataagctgttgccgggtaaagatttttcccggaaaagaaaccatcttatataagagcatgaattctttctgaggaagtaccatactttccgaggaggtggagaccgtcagggaatcgcactccaaaatggtatctccgattcgctgtttccgctcattgatcatctgtgctctgcggagaagtgcacctacccgcaaaaccagttcattgatattgaccggtttcaccatataatcatcggtaccggacagaaatcccatacgcatatcatcaaaagcatctttggcagtgaccataagtacaggaatggaatctccggcatctctgagtgagcggaccagttcatagccatccatgttgggcatcattatgtccgaaatgatcagatcgtaataatctttttccaggacatccagcgcttcctgcccgtcagagaccccttttactgtataaccgttttttaagaggacatgccggaaaagctggcggagttccaggtcatcttccgcaatgagaattttaaacatttttacatccctattccttgatcttttcaatgtccatgttttcaggcaggatacagcttaaaacaatggatatgataaatacaacagcaactacattttacgcaaaaacggactgtatgatcgacgggaaaatatcccagatcccgctctcacttgctgtggtgaatccgattccgacagcaagagaaagagataggcggcagcagtccgatgtgaaacaaactactattataagaaaaattacggaataatcataacatagattcgttgtggaaaccagacggattttgatgaataaatgtaataatagatgaattaggtcatattatgaatatttatacacgaaaaaaagaaataccctcttgcattttcgaaacttttactgtagaattattaaccaggtaaacacaaatgtatgccatacccgaacactgattacaaagatgtaaccaatcttaactgtatcagtgttttttaatatacaatggggaaacgaggaaaaagattatggaaaaaaagcatgaaatgatgagtctggaggactccgaacagctgaaaggcagaatgaaattctttgaaaaggaactggtagagaatcatcacatcgatcccaacctttatgtggaatacgatgtaaaaagaggacttcgtgattccgcaggtaaaggtgttctcacaggtcttactgagatttccgatgttaccggctataagctggtcaatggcagacgtattcctgcagacggtgcattgtattaccggggaatcgatgtgcaggatatcgtaaacggactgaaggacagacgttttggttttgaggagacgatctatcttctgattttcggtaagcttcccagcaaggaagagctttccagatttcttgagcttctttctgacatggaggatctgggaggacgttttgtccgtgacgttgtcatgaagggaaccaatgccaatattatgaatgctatggagcgctgcgtacttgctctctatacatatgatgataacccggaagatatttctgtggagaatgtactccgccagtctctggaactgatcgctaagcttcctgaaatcgcggtttactcctatcacgcataccgtcatttccgtaaagacgagacactttttatccgcaatccgcagaaggggctttcacttgccgagaatatccttctgatgcttcgtccggatggcaattatacagagcttgaggccaaggtccttgatatcgcacttgtacttcatgcagagcacggcggtggtaataactctacttttaccacacatgtagtaacatcttccggaacagacagctactcttctacctctgcatccatcggttcactgaagggaccgcgtcatggtggtgccaacctgaaggtccagaacatgtttacagatctgaaggccaatgtaaaggactgggaaagtgatgaggagatcacggcatatctgcagaaaatactgaataaagaagcatttgatcatgcaggtctgatctatggtatgggacatgcagtttatacactctccgatccgcgagaagtgatcctgaaacgttttgcacaggctcttgcagaggaaaaaggaatgatagatgaatttaagctctatgataaggttgagggtattgccggaaaactggtcatggaacacagaaagctgttcaaaaatgtttgcgcaaatgttgacttctacagtggcttcgtttactcaatgcttggtattccggaagaactttttactccgatctttgccatcgcacgtatgcctggctggagtgcacatcgtctggaagagctgatcagtgccaataagatcatccgtcctgcttataagtatgtggggcatcatgcagattttgtaccttttgatgagagataataaacagaatgataaaagcagtggggatttctgatctatttaagttggaaatctctgctgtttttttgttctcctaaattacagaaaaacaggatcataactatacataatatatattatgtaaaataaatatctgttttcacaaaaaaacaaggctcaccgcataagatatgatcggattgccttgttttttatggaatcttactttattattcctttcctatcggaagctcttcagccagtttacaagagaatcatgccagatgttgtcgtatacggtctttttcatctggtcatctacgggtccgtttcctgccatttttgcaaggatagcagcctgaagttcgcctactgtcatttcttctggtgttttgtgcggatttggcgcagtgaccgtttccgtttcctgtgtattggaggattctgcttcaggagttgacggaatatccgctgcgtttgctgtattgtcagaagctttatctgtattttcagcgtttgaagcttctttttccggggcagcttctgttacagtgctgttttcagccgcctgctcctcttctgcctcagatgcagcgttttcgttctcttttgctacggcagtttccagaacattagtctgaaccggcttatattccggcatatctcctgcaggaagccagatctcaccgctgtttgctgcaacacggacacggatccgtccgccctgtgcggaaaccttctgacctgtgagggcacctacgtattccggagcacttcctgttggaaggttcatctctgaatcactgtcatcattattcacagtaacgatcactcgtatgccttccagatctcttgcaaaggcaaactgacggtttgtaagagccagttctgcgtaggaaccatagcttaatgcaggagttccctggcggacctttccgagggctgcgatcagtgcagtacatgggttctttgttgcagcatccgcataatcgttaagatcaagtgccggacgtaagctggcatcggaaaatttttctttttttccgtcaataccaaattctgagccgtaataaatgcttggaacgccaggtaaagtataaagaagtacatgtacaggagcaaaatgtgctttgttctgcaatttggtatgaattcgctctacgtcatggttgtccacgaaattgtagaggtccagatctcccatattctgaagatattttactgtatgagcaatttcaaaatagttgtggtcattatgtccgctgtaaagtgccttgtgaagggcatagttggttacactgtgaagagtctgtccgtttacccagcggctgtaatctccgtgaatgacctctcccataagccagaagtctttcttaacctcatctgcggtatgacgtagaatacgcatgaaatcaaaatccagaacatcagcggcatccaggcggattccatcaatatcaaattcggaaacccagaaacggatcacatcacagatatagttctgtacttccggattgcgctggttcagctttacaagaagattgtatccaccccagttttcataggaaaaaccgtcattatattcggtatttccgccgaaatttacattgcagtaccagttaacgtaaggggaatgctcacggtttttctggatatccttaaaagcgaagaaatcacggcctgtatggttaaatacaccatcaaagatcacgcggatgcctttttcatggcaggcttttacaaaattggtgagatctttattagttccaagacgggaatccagttttttgtaatcggttgtctcatagccatgtccgacactttcaaaaagcggccctatatataaggcagtacatccgatctctttgatgtggtcaatccacggcagcagtgtgttcagtcgatgtacaggagttccgtaatcattttcttttggagcgcctgtaagtccaagtggataaatatggtagaagattgcttcgttgtaccagctcataatattacacctctgttctaaaaatttgcaatttcctgataattagagaaattacacaaatatcttctctataataccagattcctataatataatccagaataaatcagccagtttttcagcgaaaaatccggcatattgctaattgccggatcttacctgatggacatatgtttattcgtcaaattctgcagtaactataaagccgcgtggcgtatgctcaatgcttttgatgatcccctctttggatctgatgcggtctgcgtttctgtagcagccagacatggctactgcaggctcaatgatatagctgtagtttgtggcagagagaaattcggagatctttactttatctcccacctgtatcagcccctgtctttccattttaaatttttcttctcgcataaacatgccttctttctgtataaatacgcaatgtgaatatatctgtaaatacaattaattacatgtttaagatctttaagaaccggatgggatccgtaccagaagcttctgtccgtctttttctactgctgtaagaacgggaatatgtttttttcgcagagcatgaacgatgggatacagggaaaacatggcattatctgcaaaaactgcttccggtttgtagcggaggatttctttaatcctgtcttttataaagcttttccattctgtcttttccatggagagttctccgtagattccgttcagagtcagctccggtaattggggaaccggcagatgtacgatcctggcagaagaaagatccggaagcttttgaagcagcatgtctgtttctttatttccgccaaggcttacgatcacagcttcttcatggaagacggcaagactgctcctgcaggcaagaacagaatcctcaagggttccgcaggtcatgagaaatcctcctttatgacaaaaggctgcacttttaagaccggttaccaaagataactcttcgccttccaggccaagccaggaagaaggaaaactgcatttgtaattcatggaatattcttttttctgtggctggatacagtaaccgccccggttggacggaaagatcacaaaagcaatgttggtttccgaaaggcgtttttggcagggaataaattccggaagtataaggatattggtattttctgccggggtatcgcccgaagcgagggaagcagcatgttctgtaagaacttcttccacccgtctgtctgcacgttcatttccaaggtaacgctcgaatttattttccaggatcatgcctgccacactgactgcctggaaaaaggcttcgtcattactgcttttggaatcccatcccggattaaaattgccgatcagtgtggcaagttcatttttttcaccggtattatcattgatatccagaggctggacaaaggattcatcgaattttagtgccagctcctcacctaggatttccggtccaagcttttcccagagaaggccgaaggccgcatatgggacaccattatcgcggatacggctgtctttctgatgatgatcatactgtcctctgccaatatcaaaaacaagaccttcatagttttcaggaacctggtttccacgtgtgatggtgatctcgggattcagatataaaagcagagcggcagaaaaaacatcgtctgcgtgaaatttcccgctgtgggtgaatgcggatgcatttttttgtttgattttttccagtaaatgattcatatgaaacgctcctgtgtgtttattctgctcttcagtataccacagaaatgaagaataaacaaagtttcctacagttaaaaagggatccgtcctgaggacagatccctttaaaaatttacgttcttttatgctttatgtacaaaataggacgttcatattcaattttattataatgcgcagataattttatcctgatatgcttccggaacttcttctttatccagagacatactgataataaaggaaactttgaaggtctcaccgatggcacttaactgatccagtgtttcggttgcatcctttccttcaagcttggctgttgtaaggaagctgtccagatatacctgctccagatcatgatcctgagagaggataccacagataaatcctacaaactcgtccgcatttttaaccggaaatccggaaacatcgataaggcggaccttgttgttcagctcatacatgtgcttggtgctcttgtctaagtaaacaatactgccgttggcgtccttaacagctccgtttactttgtctaatagtacttttgtttttcctttgcctttctttcctacgatcagttcaaccatcctgttttcctccttagacacatataataattttgaataaaattgctattgatatgcttcaaattatagtgcattgtgaataaaattgcaagggctttttgaaaaaaactggtaattttaatcaagccttactgctctctttcattttccatttgtgcttttgctttccttccgatccgggcagtgctgttcatgatactggcccgggtaaccttgtcgtttccgtacttcagacggatggaatccagtgctgcatccagtttctgctggcgttccttcttgtgagtattctcaaaaaaggacagctgttcaaaggaatcatccgtaagaccggtcagtgatactcccaggagccggagtggctgtctcatccaggactcctgaaagaggttttgggcatttctgtaaatctcttctgtgatatcggtggcatttggcagtttagtctgatgagatttgtttcgaaaatccagggtacggaaggttacagaaatgcaggtgcattttttctttttgcggcgcatgcgggcggccagaatatcgcattgttccagcaggatcggaagtgcctgctccagtgagaccagatcatcgttaaatgtagtttccagactgaatccttttgcttcatcaggttttgctttcacaggggagtcatcaaggccacgggcatactgatataactgctgtcctgctttttcaccgagaagtgcctgtatctttgcttttttttcatgagccagatcgcctatggttctgatccctgcgtcctgcagttttttttcagaggatctgccaagaaaaagaagctctctcactggaagaggccacatttttacagggatttcttccggaaataaagtatgcaccttatctggcttttcgaaatcagaggccatttttgcaagaagtttattggtggagatgccgatatttacggtaaagccgagttctgtacggatcttatccttcagctcatgggcagttgccactggatccgggtaaatataggaggttccggtcatatccagaaaaacctcatcaatggaaaaggattccattaccggtgcataggacccacagatttttttgaaggctctggaacatttatcgtataattcaaagtcagatggaacggccacaagattcggacatttgcgaaaagccatagccataggctctcctgtctggattccgtatttttttgcaggaatggacttggcgacaacgatgccggtacgtttactggggtctccgccaatacaggaagggatgtctctcagatccggaagtcccatctttactctttttgctgcttcccaggaaagaaaagcactgtttacatcaacatgaaaaatcaatcgttccatatagggttcttctttcaattgtataaagtgtgtctgttatatctatttacagatttttgcagacagctgatcaaaaaggttccgatattcctcttctacctgtgaaaaagggtattgccggtattggatcggaacatggacaaccggttttggagtgtccggtgtttcattcagaagatatttcaggtcataccagagcaggtcattgtcgatctccttcagcttctgctcttctatggcagaaagtccggatcccagatatttctgatagataatgtttaaaagagcttcctcctgtttccgatactcaggaagacttttcttaaatggtcttggaacatcggacatataacattcgctggcatcgtgaagaagggacgccagtataagacggccggaatagccacgtgcttcggcttctttggcacaaaggatgcagtgctgccctacagagaaaaaagtccttacatgaccatttccgcggcatagaagagaaagtgcgtgtgcaatgtcctcaatgcagatcagctcttcgtccggatgtgtcggatcaaaatgttttccagtatatgtggtaatgcagtcgcccataaaatgttacgcctttctttaagttatgaataaatatgattatttattataaacacccagagaaagtgtgtctatatgatcgcgaaataaatttcgggaactgttacagaaaaacaaaagaaatacatggctgttttacaaatatgagtgattctgtgctataatacaaaaaaacgacagggagatcatcagcgatgaaacatatggaagaaatgaagattgccggattagccatggcattatgtatcgtgatgctgggaatctatatcgtcgtcccaaaggatggaacggtttctcatcttactgctattccggataataatgcggcggagcctgttacagattctacatcagagggaactgctgatgcggattttccaatctatacagaggacagctacagcagtgagcccgagagttctgacgatactggggacggagattcctatacggaagagccgacttatgatccaggtgataattcttacgacggcaatacggatagtgaagccaatggagtagatacctcggatacttcaggtggaaccggtgaagacgcaggcaattatgaagatccggacagtggctcaggtgaagtggtcgatgacaatgattacagtggtacttcggatacggatcttgatagcagtgagaccgaagataccggcagtgatggcaccgatgatacagtagaaattaactgaatgtaaaaaaaagaataaaaaagcagatctgcgaaataaaatttcaaacagatctgcttttttgttttttgtatggaatcctgtcagttgatgttctggagcaaggatgtcatttcctgataaagaacatcctttgaggacgcacccatgacgatggaaataaatggcttcccataagcattctggcttaaaagtgccagacagttaccggctttatcggttgttcctgtttttcctccaaggatagtgacatccttaggagttgctgcctctccggtaagataatgatctgtagcgggtaaggtagcacttgcatcggagccatcggaatgcttatagctaactgtataagatgccatttgtgtgatgtctgtaaactccggataattcaaggcttctttcagcatcagataaatgtcataaggcgttgtataatgattttcgtcctgaagaccatggggattggtaaagtgagttcctgtacagccaagttctgcagcaaagctgttcatcatctctacaaatttatctgttgatccacctatatgttccgcaatggcagatgctgcatcattggcagaataaacaagaagacaatgaagaagctgatccatggtaacctgatctcccgcctggaaaccagctacctgagaaccggattccagggtaacattctcctgtgagatcgttactgtatcgtccatgtttccatatttcagtgcaagcatagctgtcatgatctttgtgatgctggcaggataaaccttgttgtaggcaccttttgcatagagtacctttttatcactgagattcagaagcacaccggactggctgtcatccagactgacagaatccagagcaacatcttttgtaacaacacagaaatcatgggcgaaacctgccgcgcgctgctcttctttggaagtcagagtattatcaaactcggagaatgcattgaaagaatttgcaggagtggaaaaatctccgcccttcagcatgtaaacaccaaaaccgccagctgtgcatagtacgatcagcagaagaaggagaaaaatggtgttgcgaatccttttgcgacgcatccgttttatccgggtattttgagctttacgtctggcagaaacagttccgtcagacggcgtggaagttctttttgtccccttggaagctgtatgtgcagcccgggaagcctgacctctggaaggattgccagaacgtacatgattttttacaggttctttacgtgtcataagtattcctctttccgaaagtaggtatccgatttctgaccttttttctgtaattctttattatatgcactgctctgcagtcctacattgagaacaagtcccatacccataaacagactgatcagagaagtaagaccatagcttacaaaaggaagcggagtacctgtgtttggtgcaaggccggtagcaacacagatgttgatgaagctctgtatggaaacaatgcttccaacaccgcagcatatgaccttaccggcaagatccttggcccgcaggctcatacggatacattcaaaggtgatcagaaacagcagcagtacgatcagagtacagccgataaatccgtactgctctccagccaccgcaaaaataaagtcggtctgattctcagaaacaaagtttccatcatttacggatgtaacactggtgtcattactgaaagcacgtcccacaagctctccggaggcgatggctgtttttgagttgttctgctgttcaatatcatctgcgtattcttcgttctccggatacaggaatgacatgatacggtttctctggtaatcctgtatcagtttctgatccggctgcacgataatggacagaaagatgatggccagaggaatcgcgatcaaggctacacctccgatgatcttataactaagtcctgcgatgtagatcagaatacagaacaggactgttacggtgatggtgtttttcatatccggctgtacatagatcagcatcagtgggatgaccagaaggacagctgattgtatcagagtctttaaggtattcagatcttcctcatgatccataaaaaatttggcaaaaaacaggataatgatgatctttgaaagctcggtaggctggaaacggataaaacctaaatccacccatctggcagcaccattggcgctggatccgaagaaccggacagccagaagcataacgatattaaatccatacatgatccattgaaaattcagcagccaggaataatccatcagtgaaaggatcagcataaagactacaccgatgatcacacccagaagctgacgtgtgcgaaggtagtcggcagctgttcctacaagctgaattccaataaagctgatcgccaggagaaagatcaccagtcgaaaattgtaaaaccgcagcttatactgtttaatcataaattatgcatctcttttcttaagtacgggtatgactgcatgcagaacaggtggttcctgtgtgatctgtatggtcacccctggttcatcaattacaacgtatttttttacggcatgtatcagatcgttccgtaaaagcttcatcatctgtggagaacagtctatgcgttccgatacaagaagaagcttcatcctgtcgcgtgcatagcctgcagagtggtttttcccggagaaaaatcccataatcattcctcctgtgatgaaaaatgtcagacagcaaagcgtctgttattttcgaaaaatgctgccaagacggtgaaatacaccattttttcgacgcacagtaacataagggacctcttcgcccataagcctccggcagatattgcgatactcttcttctgcctgggaattttttccggataaaggttctccctgatttgtggaaatcacgatctgttcatcatccaggatcgcaccgatcagatctacagccaggatttccaacacatcttctacggacatcatatcacctctggcgatcatttccggtcgaagccggttgatgatcagccggatatcccggagccctccggactccagcaacccgatgatacggtctgcatcccggatcgcggaaacttccggtgtggtcacgaccagtgcacggtccgctccggctactgcatttttgaatccctgttcaattcctgccggacaatccagaaggacataatcgaattcttcccggagatcatcggtaagcttgatcatctgttccggagatacggcagttttgtccttggtctgggcagacggaagaagatacagttctgaatgccgacgatcccggatcagtgcctgtttcaggcggcagctcccattgatcacatcaaccagattataaacaatacggttctccagtcccatgacaacatccagatttcggagtccgatatcggtatctacaactgcaaccctttttcccatggcagccagtccggtcccgatatttgccacggtggtggtttttccaacaccgccttttccagatgtaatgacaatgacttcactcatgttttctgattcctcctataaaatgttccacacttctggtatcctcataaagtttgtttagtcattcgatacattactggtatcgcttgctgcatagccagtgagaatggtgctttcatctgcaagtccgaaaatgtatttaaagatatcattagctgcaaggcaggcattaccggatgcatatccgtttgcgattcgtacagatattgcgtacttgggatcagaaacaggcgcatatccgataaaaagtgcattgttcggatgataatagtcaatctcggcagtaccggtttttcctgctacttcaactccaagtccgttaaactgatcatgagtctgcaccacacgatacataccgtcatggatgtcatcccagatattgctggaaagatccagctgtccagctgtttcggaaggatattcctttataagttttcctttggaatccgtcacacggtccagaagggaaagcttatagatcgtaccggaagtggcgatcgttgacgcataacgtgcaagctggctggtcgtaaacgcattggtaccctgtccaatataggaagggacggcgtttttgtcagaaacctgcggagaagcttcggaaatttcaatgccggttttctgatccaatcccatgagggaagcatatttctgaagcattccaagacttctggcttcagaaaagttaccttcggaatctttaccaagttcgaaaccaatcgtagtgaaaaatacgttacaggactgctcaatggcttcacggatatcaagagaaccgtggccctgtttattccagcagttgatcggaggtgttacaaggtcaaagcttcctgtacattcaatatatgtgccatcatctattacgccctcagacatgccggcaacagtagataagatctttaaggtagatcctggagccgtcttctgctgtgttgccttgttgaagaacgggctggaaagatctgtggaaagctttgcataataatcagtatccatattgttggtcagacgattattatcatatcccggataggaaacacatgcgagaacatttccggttgtagtatctgtgatcaccgcagatgcagagcacggagccaacgcaagctgggccggtgtgatctcaagatttgcgatcttgcgatacatgaaggtgtaggcatcaagaccaccggaggccattgtctgatacagctcgtcttctttggaaagaacgccctgttcatagagaacaagacacagatcttctccactgatggtgtcttcctgaagcatatatttatacagaagctttgaaaagcctgtatctgttttcaggtaatcaatgatataggcggtaagagcctgatagatctcttcagaatccagatattctccggaggttgagatctgggaaatatcgatccagttctgactggcagcgtagttcagataatccttcagactgatactctgatcatttttccaggctttgtatgtttcatccgcggtatcaatggaatcacttttcagtaccttcaaggtattggtaagaagatcatcacagatataggtaagatattcctgcatctgcgtatcttcatccttataggctggaggattgtcgcctgtcagcctgttacttattgtatcaaaaacctgttgctgtttttgctgaaatttgacgtataaatttttttctgtgtcggaagcatctgcatcactgaatttattgatatcgatcacactgtttgcgatcagtgcattgtatacatcatagattgggatggtgatcttacttgcatctttctctgcttcataatcaaagcttttattcggtgtcagtttagagaggacaataccggcaacacgctgttccaggatctggtaaatactcttctgccagtcggaatcaatggtcagataaacatcgtttccggccacaggatcaacagttttggaattgtcgatatcaaggactttaccaagattatcaactgtgaccgtttcttctccatcttttccctgaagttcaagctccatatactgttcgatcccggcttttccaacaaccgcatcattggaataatcaggattatccttacgaagggtttccagttcttcagaagaggcctggcctgtgtaaccgaggatcggcgccatactctcatcgtccacatattttctggtggaatcttctacaatgtcaataccctggagagcggcctgattttcttttatggctgccacagatttttcactgacatttgttgcaatggtcaccggcatatatttcttgaaactgttggtgttcagctgatagcgcatgatcgcaatttcgaggatttcctgtttggtaagctcttctggaagagaatgtgcggcaagttcttccggggtgtaggcatcttttccgtaaagaacgatagaaaatccgctgcttccggtaagatgatccatgatctgggctgcggttgcgtttttctgctcctcactgagatcatcaatctgtgcttctccgtaaatatccgcacggaaacggttaagagtaaatccttcatctacatcaaaagcatagtcgccatgatcattgacggtaatatgaaaattatcagataagctgtccccgtttttggaaaggatctgtaatacctggtaggcgataccgttcagagtcagattcttttctctggtgctgttgtatgtaccgctatcttcgaatgtgacagaatatgcaagtacattggaggcgacaactgtgccgttacggtcataaatattaccacgggtgcttttgatcacgcgtgttttggtggtacgtgtctgaaatttactgatgtaatcctctccctgtatgatctgcagactgaaaagctgccggaccaggacagatgacagaaaaataaatacgatcacaagaactgtagtacgtttcagacggatttttttgatgattttttttattttaattcccaaatagactcactttctttccttacagtatccattaagtggtagttgatccagtaaaatacccggtatacgatgatggtgagaaaaaccgtatatacaatctcggggataatgatcctgtatatgtaggtccagaatccaagacggcctctgagcagaaactggaggccatacacagccagattataaagaagatctgttcctgctacaagaaaaagcggaactttcagatcatcatcataaaaactgcggaatgcatagccgctgataaaacctatatacatatagatcagtgcataaaatccaaacaatgatccataaaagagatcgacaaaaagcccggaaaaaaatccagtccacagaccgacttttcttccacgcataagtcccatagatacacacaggatcaaaagcagatttggagtgatggatccaatggaaatacggtccattactgtgcactgaaggagaaaacagacaatgatagtgataaataatataatcctatttttcattggacgcatcctccgatttgtctatcgcgtcctgtttattggtggtgatcacaaatacatctttcagatgaccgaaatcaaccggtgtaacgatcgtacctgtttttgtcaggttattgggatcctgctggatctcactgacataaccaataaacagtccttccacatatttttcactgatgttcgaggtgacaatacgttctccgactgttaccttgttatcctgatcgtaaagctgctcaaagcttaatttgccttcatcgatcagtttcagatctccagtgacaacgcagttgtcggaagtactgactgccatggcactgacattgctgctgtcatcgatgatggaacggacagtagcccaggaaggtcccacttctgtaacgatacccacaagaccctttccggcgatcacgttgttatcaacccggatcccgttattactgcctttgttgatcataaaggtatcataccagtttccgggatctttggagattatccttgcggcaaccttgggatagtcggtatattcctgatcaagatcgtaaagttccttcaggcgtgtgagctctgtctggtcctggatcaggatgttattctgttccgtaagactgttgatctgacttttcagctcttcgttttcctgaagcacgtcctgtttatcacgaagattgttttttacatttccaaatatatcgctgacaccggcgatccccttttcaaagggaacgataagaaaaccggctgcttcctgaagtggtgcggaagaggttccggaggctgctgtagctacgatgcagcttccacagaaaaatgtcatgattaccagaagatgtttactttttaaattaaaatgaaaacgcactttttttcggatgtttttcattatatatgcccctttacagttttttctgctttaccggctgggcccatttgcgcaggtttctgtcgcggatgatcttttccaggccgtatgctgcagaagtttcatacagatcagaaagattaaaggcaaatccggtatagctagccagatagttatctatataaggaagccgtgtactgccgccggtcagataaatgccttcttttgcgatatgataagcgatctgtggcggggtacgttccagaaaagatttcatttctgctgcaatctggttcacacagttggcaatcccttcattaacaacgtaggcagaaataacttcttctcgtggaagtccggaaatactgtcgatcccgactacttttcgggcttcttttttctgatcattcagtcttcccataactactttcagacgttttgcagttcgtgttccaatctgaagattataatgttttcggatctcgctgcagatagattcgttcatctgtctgcctccgatggggatcttacggctgatgatgatcttgccgtcggttatgatggaaaactctgtactctgtgcaccgatgtttacgatcatgctgccctgattcttttcagggtcgattcccatggcaatggcatctgcaataggggactccaccataaaaacacggtttttccgcagccagtgaccattgaccagatgatagtatgccctcttttcgatagcagtcatatcaagtggtacggagaaatacatgtctgctccgagaccggatgtatgatcgattttttttatcatgctgtaaaggacgatctcctgcaattccagatttgccagcataccgaaagccataggagaatttacggaaatatctgcaggtgatttttcaaacatttcataagcttcgttccctatggcaaggatccggcgtcctctgtaggctaccatgttcttttctatgtaacttttgtttctgaaaaatgaatagacttttacagagctgcttccaaggtctactccgtaattatttctaaaaagcataaatctgtcccttcacttaagtatattcatcaaaaatccctttttcgcggaaactgacatacctgtgatcaccgatgatgatatgatccagaagatggatgccgaggagttcaccacaatgatagatccgttccgtaacatccagatcagcctggctgggggagggatcgcctcctggatgattgtggaccaggatcaggttcaccgcccgatactttacagcttctacaaagacttctcttggtgtgatcagtgtggcattgactgtaccgcggcttaaaagctgttcccccgacaaatggttatgtccgtccagcatcatgcagtaaagcaattcctgctcttcatgccggagccgctccatataatatttcgcaatggttaccggatggtgaaaagataattccggttttgcagctgcggttgccatacgcttggaaagttccccgatacatttcagctgtatggcttttaccttaccgatcccatggatcttcatcagttcctgcatggaaatatgaaacagtccaagcaggccactgtatccggtctgtttcgataaattcaggattttatctgccagagtcagggaactggatccctgtacgccacagcgaaggatcacggcaagaagctctcgatcgcttaaggactgttctccttcccgcagacatttttcatacggacgctgataatctggcatttccattatagtatctttcatatgatttcccttttcgctctcgaagaaggggatgcaaaattgcagaagttattttagcataaaaaagcagggatgtacactctatcccggaaatttccacttttttcacattttgtttacaggcagggcataaacagaagcgactgcttctgccaccttgatcccgtccatcgctgcggatgtaatgcctccggcgtaaccggcgccctctccgcaggggtagatcccttctatattggaagtgagctttttcggttcccgaacgatccgtacaggagaagaggtacggctttctactccttccagcaatgcatccggtcggtcaaaaccggaaagcttttttccaaaagcatggattcctgcttcaatggaatcgccgatctctttcgggaaaatactgcggacatcggtaagtgtataagctcctttgatacaggggatcacatctccaagcctggtacttttctgatgggtacagtaatctttgaaaagctgtaccggaatttttccatttccggcttcccaggcagcgcgctccagttttcgctgcagagcgattccgccgagaactccctcttcaggaaaatcagaagggtttaccgtaacgatgatagcactgttggcattatggctgtcacgtgcctgatagctcataccattcactgcaagcataccttcttcagaagatgcatttacaacatatccgccgggacacatacagaaagaataaacgccacgtccgttttccagtgtatgggtaactttgtagctggatgcacccagacggtcgttttccggttccccgtaaagatcctggttgatcatggtctgcggatgttccacacgtacccccactgcaaaagatttcggctccatgttaatattgtgtttttccagcatggcaaacgtatctctggcgctgtggccgggagcaagaatgcagatttctgccggtatttcctcttttgcattgacaatgactgcattaagcttccggtcacgaatcatcagatcagttactgtggaacgaaaacggaattccccgcccatttcttcaatctgatgacgcataaactgaacgatacctacaagctgatctgtgccaagatgaggcttttgctggtaaaggatctcagagggagctcctgcctccacaaatcgggaaagaacttcctttcctcttccaaaagtatcttttaccagagtattcagctttccatcggaaaaagtccctgcaccgccctctccgaactgtacattggaatccggatccaggatgccgtttttccagaaattttccacggtttcctggcgtttgtctgcttcttctccccgttccagtaccagtggacagtacccggctttggccaggtaccaggcacagaataatcctgcaggtccgcttccgatcactacaggacgatgggacagagtttcagagccagatgagggaaaatgatattttttctcagagattaacataatatttttatcgtgaacctttttgagaacacgggattcgttatccagtttaatatctacagtgtagacaaattttttgtcctctttgtgccgggcatccagagattgttttcggatctcataggtgaacggttgatttccaagacgaagcatttttgctatttttcggtgaagctgctcttctgtatgagtgatgggaagcttcagctgtgtgatccggatcatttttcttcctcctttgctgcccagataccggcggcagctccgcttgaccacgcccactgcaggttataacctccgcaggtaccgtcaatgtcaaggagctctccggcaaaataaagacctttatgaagtctggactccatggttttgctgtgaacttcagacgtatccactccaccggaacaaacctgtgcctgttcaaaggaaaggccgttttttaccgggagacgaaaatcggtgatcccgcggataagatccttctgtgcacataaaacacggattagtttttcaggaaaaagtccgatgagaagttctttttctgttttgtaagggcaggctgcttttctgtgctccaggtattcttccagctctttccggttcagttccggaaaaaaatttatggaaagttccacatttttgttttcatggacggcacggatagcatagcgggaaatctggaataccgggatcccggatacaccgtaatcggtaagctgcagctctccttgctgggagactgtcggtgtgccgtctatataaagtgttatcttcccttctgtccgtacaccactccagccggaaaaagaatttcccttacatttcagagctgtcagtgcgggaaggggttcgatcagatgatgtccgagactttttgcaatttcatatccgctttcgcaggaacctgcaacggaagacgcacgggaaccatttgcaaggatcacggcatcaccactgtaggtccatccgtccgtatggatcttccactgtccgtctgcaaaagacacgccggtaacggtctgattggttttcagctttaccttcaggctgcgtgccttcatgacaagaacatctaccacactctgtgcctggttgcttcggggatagatccatccgctgcggtctgtggtacagattcccagttcctgaaagaatttcagagttttttctacaggaaactgtgccagggcatctttggcaaattccggatgggatccccggtaagcgttttcatcctggttcagatttgtcatattacagcgtccatttcctgtagcacagatttttcttccgggacggtcattctgttccagaaccgtaaccgctgctccgtttatggcagcctgaatagccgccataaggccggaagcacctgctcctacgacaaagacctgcttttttaagtcctgtccttcggattttttcataatttcacaagttccttatcaaccatatactgaagagatttcaggattccaagtttagcatgctcccaggtaagaccaccctggaaataaacagcataaggtggtttcataggaccatcggcagaaagctcgatggaagaaccctggatgaaagcacctgcagccatgatgacctgactgtcataccctggcatatcccacggttccggtgtcacaaaactgtctaccggtgctgcagcctggataccctggcagaatgctacaagaccttccggtgttccaagggtgactgcctggatgatatcctgacgtggttctgtgctgttcggtaccaccgggaaaccaagtttttcgtaaatgtttgctgcaaaaacggcgccttttaaagctcctttggtaaccatcggtgcaaggaaaaatccctggtacagagaacggtttacaccaagggttgcccccacttccatgcccagtcccgggcaggtcatacggtaggaagcgttttccacacagtcttttcttccggcgatatatccgccgataggggcaagaccgccgcctggatttttgatcagggaacccaccatgatatctgcacctacatcacttggctctatggtatctacgaactcaccgtagcagttatctaccatgcagatcacatccggtttgatcttctttacaaaagcgatcagctcaccgatctgttttacagagaaggaaggacgagtctgatagcctttggaacgctggatggttaccagctttgttttttcattgactgcttttctgatgttttcataatcaaaggtaccatcctcgagaagatccacctgacgatattttacgccatattccgcaagggaaccattggacgggcggataccgatcacttcttccagggtatcgtaaggctttcctacaggggaaagaagctcgtcaccggggcgcaggtttccgaagagagcaatggcaagtgcatgagttccacaggtgatctgcgggcgtaccaggcaggcttctgtgtggaaggtatcggcataaacctgctccagagtttcgcggccaaggtcgttgtagccataaccggaggaagctccgaaacaggcctcactgacacggttcttctgcatggcgcggataaccttcatctggttgtattctgcagtcttatcaaatttctcaaaacgttctttcagggaatcttccacggatttaccgaaatcgtaaactgcagaagagattccaagctgtgcatataattctttcatgatcatttttccttttttattttatttggcaggcaggatccctttttctctgcatacagaaagcatgtaggaaaggatccggctgtcatcgtaatcaaagttatctttatctacccaggttacctcgccttctcttcggaaccaggtaagctggcgtttggcgaaatgtctggtgtcacgtttcaggatgcgaacggcttcctcgtaagggtattctccgtccatccagtccaggatttctttatagcccagtccctgcatcgaaaccattcctctgtggcagcccatttcccggagcttttttacttcttctacaagcccgtttttcaacatctcatccactcttgtgtctatgcgttcgtagagaaggggacggggtgcgttcaggacaaagtatgccagggcataggggctggtatgttctttctgctcttcattatgttcggagatcctggtaccgttctgtttataaaattccagggcgcgtatcactcgcttgacattgttctcatggatgtcctgggctgacttgggatcaacctgtgcaagcatatcatgaagaaatgaagggcctttttgttctgccagctcttccagctccctgcggtaatggtcatcctggttggaactggtaaaatcaatatctctggttacggcctgaatataaaatcccgtgccgcctaccaggatcgggatccggcctttatcataaattttttccatggcttcttttgccatctgctggaaaaggacaatattaaaatcttctgtgggctccaacacatccaccagatgatgagggacgccatccatttcttccggtgtgatcttggcggaaccaatatccatatggcggtaaacctgcatggaatctgcggagatgatctctccgtttactgcttttgcaagggcaatggaaagttttgtttttcccacggcagtaggtccggtaaggacgataagaggttttttcatagattttctccgtttatgataggtatcttacacgatacgtttaaattttttttcaatctctgtcttactcatggcaatgatggttggccttccatgaggacagttataaggattttccagtgtcagaagttcatcgatcagcttgtcggcttcctggggtgacatggaatgattgccttttacagcagctttgcaggccatagttgcaagccttgcggtaaacagttcaaatgcatctttggagccgtctgcagtgagatggtccagcatttccagaaacagctcttcctctgtcattcccagaagactggatggcaccgcactgatactgtactctcttcccccaaaaggttcgatctcaaaaccgaaatcccggaaatactttttgtttgccttcagcagattctcctcctcaaggctgagtgaaacgatcagtgggggacttacatactgggactggatgttctgggactgaaactgctttacgaatcgctcataatatactttttcatgggcagcatgctggtcaatgatataaaaattatcctcaaactgtaccagccagtaggtatcaaacagctgtccgatcagtctgtggcggcttctggattcaggagcaagaagccgttcttcgaacagttccagctgttttggcggttcctgttcctgcgatttgatcggctcgttgtctacctcaggaggtgccgattcagcaggcttttcagaaatcacttcataatctgctgtttctgtagcggaattttcatttcttccgtcttttaatgttccggaaaacatttcctcttcttcttttgtgaaaggctgcgattcatatacgggattttcccgcagagaatccacacgtttgtatttatctgcagaagaagctgaagaattgtgagttgtttcagctgaaccataggaggcggtaccatttgttggcttattataaggtatcgatggaaccggcgctgtactacgtacttcagaagctgtcggtgcagcatgggaagctatatttgccgtccgatttgggtgaccgtacatctcctgccgccgttttacttcaaaaggctccggaatatttcctggctttatctgttctgtgcgggatgtcggttcgtcttttccaacagatacctgtgggatcagttctctgtgggtcaataccttgcggacagtttcataaatggccgtataaacttcggtttctctggcaaaacgcacttctctctttgcgggatgcacattaacatccaggtcattgccgtccatttcgatccgaagtgagacaaacggaaatttatgctgcatgacaagtcctttatatccgtcctcaatggccttggtaatgatcttgttttttacatatcggccattgatataataattctcaaaagtacggtttcctctggaaatctccggtttccccacaaagccctcgatcttcatgaaatcattttcgtaggaaacatccagaagcgccttggcgatctcccggccgtagacactgtagatcacatcttttacgctgtagtttccggaactggaaagcttcacctgacggttctggatatatttaaaggagatttccggatgggaaagcgccagctgttccatcagcgtattgatgtaaccggcttctgtcatgtcggatttcagaaatttgcttcttgcaggtgtgttgtaaaaaaggttccggatcaggaaggtggttccctccggtgcgcccatctcctccaaagactgttcttttccaccttcgatcacatagcgggtaccgctgatcccggaaggagtctttgtgatcagctccacctgggagacggcggcaatactggaaagtgcttcaccacggaagccaagagaggcaatgtgggtcaggtcttctactttttcaattttacttgtggcatggcggagaaaagcaagcggaacctgctctgcatccattccggagccattatccgtgatacggatcagcttttttccgccgtctgtgatctctacagtaatagcggtagcacctgcgtcaatggcattttccacaagctcttttacaacagaggaggggcgctctacgacctctcctgctgcgatcttatcaatggtattctggtctaaaactgcaatttttttcaagggtatcaccaccggttcttaattttgttctgcaggttatagagaatattcaaagcttccattggtgtcagattcccgatctccaggtttttgatctcttcaatgatatcattgtcctgtaccgtgtcaaacagtgacatctgtgccatatctaactgatcataggtgatcttctgctttttctttggagcagtcagatcttttacagctgcagtgatatctgcatcactgagctcctctaccagttccttggcacgctggatcacggaatccggaacaccggcaagcttggctacctggataccatagcttttatctgctccgccttttacgatcttacgcaggaatacgatatcgtcacctttttccttgacagcgatacagtagttgttgacaccagaaagcttgccttccagttcggtaagctcatgataatgggtcgcaaataaggtcttggcgccgcagagtttggtgttgctgatgtgttcgatcactgcccaggcaatggaaaggccgtcaaaggtactggttccacgtccgatctcatccaggatcagaagacttcgggaagtggcattacgaagaatgttggcaacctctgtcatctccaccataaaggtactctgtccgcttgcaaggtcatcggatgctcccacacgggtgaagatccggtcaaccacaccgatattcgcactgtccgcaggaacaaagcttccgatctgtgccatcagtacgatcaatgctgtctggcgcatgtatgtggattttccggccatgttcggtcctgtgataatggagatacgttttttgtggttgtcaagatacgtatcatttggaatgaacatatcgttttcgatcatctgttccacaaccgggtggcggccatttcggatatcgatgaggccggtctcattgatcttgggccggacaaagttattcctctgtgcaaccagtgcaagggaagcaaaaacatccagagcagctactgcctttgcagtacgctggatacggacaacctcagctccaacctgatcacggatatctgaaaacagttcaaattccaatgcataaagcttatcttccgctccaaggatcagatcctccagatccttcagctcctgggtgatgtaacgctctgcgttggtaagggtttgtttgcggatatagtcctccggcacgagatccttgaaggtgttggtaacttctagggaatagccgaatacacggttatatttgatcttcaggctcttaataccggtgcgttcccgctctcttgcttccaactcagataaccacttctttccatctgtccgggagcggcggaatttatccacatcttcattataaccttcccgaatgataccgccgtccttctgggcaaggggcggatcatcagtaatggaattacggatcagagcggtaatgtctgacagtggatccatgtcttcattgatctgcataagcagcggagagttaaatcctgcaaggatctgctttatataaggcagcatttccagggaagaggcaaaggaaaccagatctcttgggttggcagatttgtagctgatacggcttatcagacgttccagatcgtagatcggatttaagtactcccggatctcatcacgatccataggttttgcgttcagttcttccagggcaccaagtctcttttcgatttcctctgcatcgatcagaggctgttccacataagaccgaagtgttctggctcccatagctgttttggtcttgtccagtacccagagaagagaacctcttttctgtttttcgcgcatggtttccacaagctccagattacgacggctggagctgtcgataagcatgtatttctcggcagagtaagggcggatacttgccatatgggaaagtgctgttttctgtgtttctttcagatacaggaacagagcaccggaagcgatgatcccgctgtcgtagtcaccaattcctaacccctccagatttcccacatggaaatgttcttttagagttttctgacacagctgatcgtcaaagtaccagggatccagggcgaatacgcagattccaagacgtcctttcagatcctccacatccacaccacttaaaagaaacgcatcgttgcagatgatctctgcaggtgtgaatttattgatctcatccagaagtttctgaggcttatccagctctgtaagaaagcagtcaccggttgtgatatctgcaatagcacagccaaaatgatctccgatggagacaatggacatcagataattgtttttggattcgtccagtgacatggcatccagtgtggttcccggtgtgacaatacgaacaacttcacgttttacaagacccttggcttttttcggatcttctacctgttcacagatggcaactttataacctttttctatcaatcggttgatataagtttccgcagcatgaaaaggaacgccacacatgggcgctctctcttccaatccgcagtcttttcctgtaagtgtgatctccagttccttggatgcagtcagcgcatcatcaaagaacatttcataaaaatcgcccagacggtaaaaaaggatacagtcgctgtattcttctttggtctttacgtattctttcatcatcggtgataatgtactggtatcagccggaaacccagtgtttatgcgggtttcagatgccttatatttttttttgacccacttttgacccatttttttctcttcttcagtgtttcttgctttttccaaatatttaaacctcttcctaaattgtcattttatcagtaaaattagctttcttttccatacttttcttcataatttcttatcgtggttgctttaagattccgaaccttataaagttccatccatttctcataccattttgaaacggacatactcgaatcaaagcctggaatacctgggagaacttccgccaaatacatgtttctttgctttttcacctgctgaagatttgttccatagatagaaaaaggcggttgccagatcccttaattgtgattctggcttcttaccgcccatcttttctttgtcggattcccttacctatttcttttcctcttagattttttccataacattaccatcctttttctaataacaatagatgatcatgcatggcactggacttaattttaacacaaccccaaaaacctttcaagactgccgatctatccatttctgaaattttttcttatcaatcagggttcttcgcccaattcgtaccatgaaggtattattcttcataagaattctcatggttttctctgaaagacctgtgcgttcacaggcttccttgactgatataagaatcttatcgttatctgctgcttgtattttttatgtatcatatatattacagccaatatctgaaggcagatgatattggctgttcctctcttcgattaaattattcttttgtcatctgattttaatttctatttttccttccactgggctatataaatccagaggatcttcatcactttcataaacacgtccttcgccttctccgtaagtatcttctattccagtttcatattttttatatgttgtgctgcttttttcttctttatttacatataattttaatgtcaccgttttagcatctggcgaaattcctttgtattttgtattatttctgctttcttcaaacacagtctctgtgtccccataatttgtcattctataaagcccctgatttcctttatcgtcggttcctattaaataataatcttcatattctttattatccaaatttccataaattgtacttgccaaatcgtttaagctcatttttgaaattgtcagattttgatttggagatatctttatttttttattcacatttacatttatggtattcttctccagttcttcccaatttgatgaaaattcaaaaatatagtcatccgtatcttctgtatctgcagtatccatttctgttggatcaaataaccatactttcatttttatatctgctgtattatctttaatagttgtatcttccagcctataatgacaaacctgaccatctgttccgttctcctttttctccagagcatatgttccatctaactgtgccgcttttccatttatctccacttctgttagtagaatagtatccttttcttttgaatcatttatattatcagatattgccacccataaattctccttatcagcagcaatttcatctaatgtaatagaaattccatttttagtaatcgtttttccaacactatctatatatgattctacattttcattgatccccaatgcagtttgaatccacgaagtaatctgttcccaggccgcctttatctcatgcggatgtcccaagcctcctatcaataatgctattacaactcctgctactgcaatctttgctaattttaatttcaaattaacatttcgctttttccatggcaaggaagcttcgtaaacaaatttttcatctattcctcccatcagatccaaaaaattgttttcttttttcatatgatttctttcacctcttcccataatttgtttctgcttcgaaaaagactggatttaattttagtctcagagcatccatgtctttttgcaatgtctttaatattatccatataccaatatcgcctgacaaaaatatccctgtcccctgcttttaaatcactcaaaaatttttctaaaatattcaaaatttcctttttctttatatcctcttccacataatcctttattgtattttccagtttttccacttcaccacaaatatccatcatgtgtgtatctgctctttttgaagcatttttctttctgaaattgtccaatgccaaatttctggttatttttccaagaaatgcagataactttgttggcgttttgggcggaatcttattccacgttatcagccacgtatcatttacgcattcttctgaatcttctgtgttatataactaagacttcccacaccaataaagtgtgttgaaccttgaaaattcaatatttcagccaataaaaaggcataaatacgttccatttgctataatgaaattgccaaaaaccattttcgcaaaggagatttatgccatgtccattatagcacagaacaacactaacgagatagctctacttgactgtatccagagatttttttcaaaacaccatattggaaaactactggctaaatgcaatggcacgaaagaaaaaggtgtccctgccatttctcttttgaggtataagcttggaaatattttcgtagggcgaagtatgtatatgcagcaacgcagtggatccttcaaggaaggattctctaaaaataccttttaccgtttcctgaattccacaaagacaaactggcttcgtttcacttctcttcttgcggcagatattgtcaacaatgatctgaagaatcttacagatcaaaagcgcaccaatgtctttattgtagatgacagccttttcaaccgatccagctgtaaaaagacagaattgggatcccgtgtttttgatcatacagatatgacctataaaaagggataccgtatgcttacactcagttggagtgacgggaataccctgatcccggttaacagctgtctggtcgcatcttcaaaagagtccaatgtcatcgggcctgttcatacatttgataagcggaccattgccggaaagcgcagaaagctggctcagaccaaagcacctgaagtaatgctcacgcttcttgatactgctacatcttccggattatcagcggactatgtcctgttcgactgctggtttgccaatccggcacagatcacagccattaaatccagaaacatggatgtcattgccatgatcaagaaaagcagccggatcaagtacggatacaagggtgaacagcttaacatcaaggaaatctattccagaaacaagaagcgccgcggcagatcgaaatacctgctttccgttgatatcatgctcgggaaagagaaccctttcccggcaaaaatcgtatgtgtgcgaaacaaggcgaatcgcaaagactggcttgcgttcctctgcacagatccggatctttctgaagaagagatcatccgtatttatggcaagcgctggcagattgaagtattcttcaaaacctgcaaatccatgctgaatctgatcggggaatgccacagcctttcctatgatgcactgactgctcataccgcaattgtttttaccagatatatgttacttgctctggagcaacgtcaaaacgaagaccagagaacgcttggagaactgttcttcttcctggtggatgaaatggcggatattagcttttcaagatctctttgcattctgatggatgctttcatggcaagtcttcaggagatattaaagctcagcgagaatcagctggcagcatttactgctgattttgaagctcgtctgcccgaatatctgaggagcgtgctccatcctgtggctatagtagcataaatcgctattttgttagctgaaatattgaattttcaaggtgcgaagcctatttaaggtatgggaagtcttagttatataaaatattccatgcaatcttaaagcaaaatttttcgtactttacttctacctggcgaattgcatcttctgatctttctaaaaataaatttataatatgtatatcttccatatcacatttctcccctgtatattagtgtttttatgcagataggttatttgcagtgtgccatattaatgttgtctattatatataacgtatttttttctgtttggttgcactttttttataaatttttttgttaccataattccattatcactataacatattatctaaacattcttctctcttggtcaactattaatatcgtaatctacttctgcaaataaaactacatgcaaaaaatgaaaaaaggagctgccattccatgtgtattcatgaaaggcagctcctgcttgaatcatttttatttaacaactacttttacttttttacggatctttccagatttcactgtgatataggctgttccctttttctttccggtgatcacgcccttggaatttagcgtcacgctcttcttattcgaagaactgcaggtaaccttctcctgggaagtgatcgggctgatgactggtttcaacgtaagtttttttattccttgcaacggtcacgctggatttcagtccggtgatctttattgttcttaccgttgttttctgcacagtaatagaaatgacctgtttcttgccgctggccagtgtaatggtcactttgattattatttgaattccagccctcagccttttcattgacagagggctattatgggcttagcaattattgagcatcccttaactgatctacaatgctgcatttcgctgcgttatcatacatcatgcaggggatcagccacccaagcagaagaaataccggaattgtcagcaggacaggcagaacggtgaaccgatactcaaagaaccagaacatactgcccagcattttccccgcaagaggtcccaccgccagtgaaagcacaaaggccaccgatacggaagacattgcataaaacaacccctcgtagatcagcatggttttgagctgtcgggacgtcattcctacagcctgaagcacagcaaattcccggcagcgggaaagaataccagtcatcatggcgttgaagaaatttaagagtcccaccagcccaatgatagcacaaaggataccaccgatcagaaggaacatctgccggaactgagcaaactcagaccgagccgtggccttgctttcatacatcaggggcgaaaactcaccggccgtgagcttcgatagatattgctctgcttcggcctcgtcagcttcgtccgctgtgtcgaacaagtagagcatcggaacgaccgcaccaccgctgtccctctgtgcggtgtccacagacaaaactacgtcatatccaataccaccataacgataactcatggaattcggaagttctaccaaggcgcagaccgtgtactctacatctctggctccatacaattttgcctgaaagtactcctccggtgtatcttcggtgagttccccggtgcggctgtcgatatatttcacatcgtccgcataggtaacggtgatcgtgtctcccaccttggggtagtattcaagattgggcagattaccgtagtcatctaaggaaaccgcaatggcaatggcgttattgtccggctccaacatgggagaaatatctccgtcgaatacttgcagcttgtcaaacagactgttatccagagcctcgattctggtatctcccatcaccatattgccccggtgctccatgcggctcatatggctgtccaactgttcggcgctttcgtaccttgcatagtcctgccgcagagcatcctccgtcatccacaggtaggcgggttttcgcacagcatatcccgtgccggaaagactggcctttgtgtttgctgcgatctcctcaatctgttctggcgtgatgaattcatctgccgggttgtaacggaaatagtcgggagtgctgacgataaaatcggcgcaggtcatggaggatacatacttctccatgctgaagcctcccacaaaggcacacagcgcattgaacagtgtcaccgacagtgccagagacacgaccaccagcaccgtctttttcttgtttcgtcccagattggcaaaggccatctgatggagcttggctccccgggtgctgcgctgttttttcttagtctgtatcgcatccgtatatttggtagcctctaccggagagaccttagctgccattttgccgggcttggaacaggacaagagcaccgtcaacaaggcgaacagcatagaaccaaggaagatcacaggcgatgtgctgatggtggtgatgcctgcatccaactgggtggagcgcaagacaacaggcaccagaacagcgccgatgccatagcccagcagcagccccgccggaataccgatcagacaaagcagaagtgcctgctggcgaatgatgcgtttgagctgccggggcgttgtgccaatggtcttcagaagtccgtaaaaccggatatcccccgcaacagagatctggaaaatgttatagatgataagatacccagtgaaaatcaccagcagcagaaaagctgctatggcgatcatcagctctggatcgagctgcgactccagttgggatgaggtatatccccaattgacgccgattcgaacgctgttgggatcagtatagctgtcccatgtgtaaccaagatcggtatccacctgctccatctgcccttgaatgtttgtgccggaagccagcatgacattcaaatcggtgcggaaaggctgtaaccctgttttcactgcctgcgcttcgatgtcatctgcgtaatcacggctgatgttgatgtagtgaacaggcattagttcatcatagtcccaatagcccaccagcgtaaaggtatctgttacagtaaaggcggtttgatccttgtccgtgatggaataggaaaccgtgacctcggcgcccagctccggcgttacgccaagcagctgcaacgctgccgtatccatggctacttctttgccgctttcgggcatccgcccggtagtaggggtggcataactccatttggtgcagttggcatccatgtagctgatctctgcaggtgttttggaaaagacaccatccacagtgatgccgatcaccttccgtgcccccgcagccttcacctttggatgagcagcgatacgttccgcctgctcgggggaaacatctttaaaggtaccgtgtgcatagccgcctacctgccgaaactggtaggtttcataactggcgttcaacgacaagacaatggtaaacatggaagtaaatagcagcgttgtcagcgcaatggcaaaaatggcgatcagattgcggcgacggttcgcataaagggattttaagctgagctttcgaatacatttttgatttcttaccttcatcacggtcacctcctcatcggcccgtgacaatgcggccatcttctatgcggatgatccggtcagatagttgggcaatctcttcgttgtgggtgatcatcacgatggtctgggcaaatttttgactgctcaccttcagcagactcaaaacatcctgactggtcttgctgtccagattgccggtgggttcatctgtaaactgtacccctatccccttatgccttgaaaataggggctttaacggtatgtacatttgtgtactgtgtacacttctcttcagaaaaaggcagggcttttataccctaccttgatctcccttaaatactatgaaaaattttcttttatcctttgattgcttttatccaacacacaaaagtactctttttcttttttgtttccgtaacagaatcatagacttctttttcttgtaatttgtaacttgtaatgtacgatacttcttgtaatcgtttagcaagcctttggctttcttcgttattaggtaattcaacgctatgttttttacttctatcgcaaaatcctgaataccattgtgaaagttctgaaaaacaattttcaaaatcagccgcttctaaaatcgaaaggtatttaaacatcaacgtctttttccctttttcatctacatattcccaggctgctgtaaatatggatttgttaatcgtcatatttgaatcaactaagttttcagcaatttttgcagtcatataattttctccaaaagcatccaacagaacttctgcattagaaaaatcgagaataggcgaaagcaatagtgtttctaataatgtttttcccattggaatcttttccattacttccatatattccgcttgattatacaaaataaaatctggacataattcaggatagacatctttaatttcaccatatttattaacatcaaaaggaatatattttttcttaatcaaaattcccactttctgtctctcaaccttctctattggaatatcaaattctaattccaactgaggtaatagtttttcaaaagcagaatcatcaattgtacttgtaataagttcttcggcaaacacttcatttaaacactgattctctaaaaatgtaagttgatcactatttgtttcaatgtattgaagtagttctggcgtaatcttatatctgtcccaataacatttgatattctcccatttcagacttacttttcctttatccaataactcatcccaaagaattttcacgtccttatcaaaatcagaatcgaactttccacagcattcagaaatatcatctacgcaaaattcttcatgattcactaatttcaaacagatttcggtctcttctggagcattttccaacattctttctaacaaatccataatctgttcaacatcttccttagtattattaggtgctaatataatttccttcacatactgtttcagattttcttgtatgtatttaattaacggttcatatcctagtgaaataattgttgtataattgcgagtatctaaaccggaaagcattgtaccatcttcaaattctacaatcctacgtatcatcgtatcatttaactcatagcgctgattttcaaaaacatatctcaaaacttcctccgaaacattttcaatagaaacattcttgaaaataattccaagtgtttcaattaaggaaatcaccttttgatcttgaatagatgatagctgctgtaatatatctggattttcctctataaagtcgctcatcttattattgtcatttaattcaaataagcgttctgtatccacgttatcaataagtaactgtaaataaaaaatttttctttcatatgttatcgatatatcctggacaatatcattccacatatcaggccaacgcattgctaataattgaatcaatctctctttatattgagtttgctcaataaattcatctataaactcccaactttccactgttctatcagataattgatcgattaatatcatacgtttttcattttcattctcttcagacaataaatattccaaaagaataaaattgaaaatacttttttgttcgaattcatacggttgtaaacgctgtataaccattccaacttttgtcaagttataattatatggcagcttttccatattttttactgccagtatataattcatatcttcttttgtaatgcttgtccccttaaaataattgatataatttgcgtatttttcatcaatgtatcctcttcgaagcataaatacgagcaatttattttcagccactttttcagatagtacattatggactccaaatttttctatcaactttttaagtgaccagcctgaaagttcatgtacattcttcttcaaatcttcaatttcactttttattgaactaacacctttttctcgaacaaattgaagatttttaattctcttactatacttctcaaaaatttcccgaaaattatttacagtttttgatttatcatacccatcccatgaataataacgaacaataggagaatctatactatttagcatagataaatcaaatacatcctccattatcttattcgtagcgtaatgttgcatataatttgcttgtattcgataagtaattccttcccaatcaaccagttctcccagcatggctgttttaagttctttaacgtctcttaaacaagcagcatgatattcttttagttcctgtgtaagctcattaacttcattctgccattgcatacattgtctagatatatatttttgcttatcctcaaaggcttgtttcacaactcctctctccatttgaagttcggcaaactcccgtggatacaaatttttaaaaataatcaatgccatcattgtttcatctgacaatttcagatcctggtcagtgcgaatcgtttccttatatacgacaaactcattatatatattctgtaagattcgcatatcttcaacatatggggatacgtctaatataaattcctgtgagatttcatgaacaatccctttcttttcagattcctcaagtttttgtaaaaagatttcccctgaattcgtagaatttataattggaattaccggaataataaattcaaagaattttgttctgtctgtatccgtaaatatatcatctctaatagcataaacaaaaacaatacgccctttaatcccgtcgtagttgttcaataatgtattcaattcccgaagatggataaaaatagatggatcttctaagcgatctaaatcctcaaaaaatacaattctgtactttgtctcttcaaagaaatatacaatttcatccatatttttattaaatacagtttccgctaccgtttcagaatttttcacaactgtctctgttggcaattttacttcatttactttaaagcgaaacagcaccaaacgatatgttcgggcgatgattgccaatattcccgcacaaaaaacaaggaaaatactatccgaaaccactgcttttaatccaaattttccacctgcctcttctattttttcaattatcatttgaaaagtatctggaaaaaatataaattccgtcactcccaaaattaaaaatatcaaaaccaaatatccccagacacgtttccaattaattttgtgtagcttccgatatctgctctgcggaatctttttataattgactttataaaataattgctttaaaattcctaattcaatttcatcttgtttcaaagaaattttcttaggattccccttctcatcagtttcgttttcaacaaaagttgccattgaaacacgaagtgatttacttctaataattctatgttttttcaaatatgtatcaatgatactactcttgcccgcaccatatggacctgctagtgcaatatttttaactttctttttctttatcgcccaatgtaatgcctttaaatattcagctccattttcaatatcatcaatgggcgccaaatctgtaaattcatttttctttttctcttgtattctattatttattacttcatgaattttctccaaaagtgctatcgtaaaaatccctccctcaaatttaacttatagcactattgtatcatgaaatatttgatgatacaaaatgaaaaaagttttgctttctcctctattttatccccacaaccaccagcaggcacgtccttctcgcccctgccagccgctgattattttcttcttcattaaaaattcttgatcagattcaagtctcttttattcaatgctttccgcattgcttcattttctttccgtaatgtctcgttctctcttttcagttttgctacctgttgctccagctgcaggatacggttgtccattgccatatctaaaatctttcttctcttatctaccatgccagcctgtagctgcaaagcacgatctactgcctttcgcacttccggattcttatagaaaaatcctctggacagtccggtcttttgcatcagtttgggaacggtcactttatcctcttcttcgatcatttcctggattgccagttttgccctctgaattttctccacgctctgcttatggtttacttccagcatcttgtcatatttgctcatactctttcccccatcctgccagattcgcccgaatcatccgactcatctctgctctgatttctcttgtttcatctgcgatgatctggaggctcatcttccggtaaaatttcacattctttacagatgtatgccccaatagttttgcgatggtccagtcatccagatgcagttctgttaaacggataccatatacatggcggaacatatgcgttccaaatccgaatagttctccatgatcgtcccgcaaatcttttttctggatcagatccatcaccttgttttgaacggtattgtactgcataggtctcttgctatttttctcatccacaaaaatgtaaaccgtatctccatacatttttctagtatattggattgctttttcaatcagcagttccagttctgcactgataggcttcacaaatgtagttgttttcatctgccggatctggatcataggatgtccgtcctgccgatacaggcagtctgtctgcagggtaagggtatccgatatccttgttcctaacatctggtggatgaccataagacgctccatctgctcatccagttccgcaagcgctgcattaaaacgaatcagctcactgtctgaataagatttcaatttcggctgcacctgtctgggcaagtcactggccaggaataaaatttctaaatgtggatacccgtataattttccaatggtttccagcactccccggagtcttgtcaaatccattcggtaattattcacaccctccgcttctgttgcaaggtacgtcagatattcctccagcaactcccgattcagttcttctgccgaatggatatggggatatgtttctttcagatatttggataatctccggatggctgtcagttctttgataatcgttgcaatcgcttcatgatgtaaatgttcataaactgccttttttgtttcttcccgtaagtcatcctggataatcgctgtaaaattcaaagtctgcacatttttaatcggattctttttataggcaatgtccagattctctaatgtccagatatctttctcaatctcatcccgttcctcttccgcttctgtaaattgatatgccttccgcacataagtgatgaggctcgatggcactgtcttttcttttccatatacactgattccctgcatggtcagtttctgcccatgttccagaatccagcttcggatttttagcagccattgttcccactccagttcctgcaggctctctgcccggatgtgcttatcctttaccattctgcaaaatctctgataaatcactcgttcctgtatcatcgttgccaatgcacattgtcggcttcggtcctcaataaaggaacggaattctttttgaagtccctttgttggaagcagtccgaaatcaaagcaatgggattcctttaccttctttttctgtttttcatctgctcttgcatagcagtccaaatcgattagatataattttttatccatggaactctcctttcatcagttccgccgcaaagctgtgggtttcttcctggaaatatgcttcactggctttttccagtttcttcggcatatagtccacatactgtctggtcatttcttcgtattcatgccccaggtaatcccgtaccgcctggagggaaataccgttatcataataaagcgtagccaggttatgacggtaatcatgggatctgaaaatgtactccccgtctgcaatcttatttttctcacagtatttcaacatttgataccgtaatgtagcatactggaatgctccaccttttttgcttttaaacagatattctgccgatccaatctgatatttctttttgtacacctgcaccagcttgtacaatgcttccggaatgggaatccgcttatacgttttcattttcacctgatatactttcagccagtaatcaccattcttctcttcataatcaccacctgtcagggtacacacttcgcttccccgaattcccgtacaccataagtgcaggaacatcagccgcagatgttccggaaactctgccagcttcgataaaatttccgtatagattctttctggtacgctgcggtcattgtggccatgcacttctttctgcagataatactcatgccggaagggaatcttcttcagatatccttttactacaaggaagttgtaaaactgcaaaatcatagtgattctcccattcgctgtcttttcacgggtatcctgtctctgaacggattccagatatcgctggatcttctccgcttccacttcatggatcggattttcttctccattgaaatataccaagaatgtacgaagttcctgcagcttgatccgaatggtgctgatagataaatctgtgattccaaacaggtaccgcagatatttttgcaaaatcttttgattttccaagttggtcacctctttaaaggatacccattccacgggcttgcttggattcattcgttctctggaaaaatgaaaacgttccaaaaaccacacattcgcattccaatgaatttccggtgcctgtaaaaataggatttttctgctcatccgtaggataccaaacacagcacttttcttttcccctctaaaacgttctgagagttcctgctcaaattgctgttctttggccagtgtcattatctcaatatcagctacttgttgcttcgcacaaaattgatagagcctttgcagtgccagcagtttctcttttctgtaacggcctttgtaggtatggatcacctctttcaataccgtaaaaatctgcatcttcaaatttcttggacactccagtgtaaaatcccacagcagttccttcccatctttgctggtcagaaaagattctgctatctcaatctccggataataggtgaggcacatccattgatcacgatactccgtggtatagtttcttcgccctgccagtgtctgcatctcttttttcatctgatgaaggaagattctgtcaaatcccctcaggcaggtaattggtgcatgaacggtttcgttcctttccaaatattcttcgtatcggatccttaaggctacgcccatttccgaaatgtcggtaatcccctcttctatcaggaatttctttaccatgtttcgtatagttccatttacctctgtgcaggcatccacctgttcacagattttttgttccagtgcttcccgctcttcctgctgttcataaatatgtaattgataagcgggcatgttcttcacctcctacaggagtttctccacatcataaagggcagaatgctttgcataatattgatcgctggcttccataagctggtcatctacaaggttcagatatttgattgtcgtgtcgatgtgcttatgtccatatgcctcactgatcatttccagtggccatccggcatcccgcctcatgtttccgaagtatctccgtaacatatggggcgttgtatggatgcctgtctttttctccatccgctccagcatccggtaaactgcatccacctgcagtgcctttccttttgtctctccttcgatgtttacaaacagcatcggctggtgctgtaaaaattcccggtacttggacaaataaaacagtaaaaactggaaggtggcatcactgactttggatcttcggtacgccgcattcttcgcccttgccttgttctcattgtcatcccggaagaatacccggatggtgtgtctttcataatcaatatctctggtataatttacacctaaaatctcgccgattcggtatcctgtttctgccagcagcatgatcagaagctggtccctgcagttggtacactgcttcaaaagttccaaaatctcctgatgctctgccggacggacgtttcgttcttcctctttcagatagccattgaatgaccggaaccgcagcttccgttttacaccgatggaatcatgggtggtaaaactgtcataatataacactttcagcctttccatatctgcttccagctctaaaaaacagaaaaacctgaacacgtcttttaagtacgcattgcaggttttattgcttggcagtttctctttcttttcatgcaaatggtttccgactttcagccagtggagaaatcccacataatgttcatactgttcctggaattccagttccgccacctgggacagttccatctttttctcatccagatattccagatagaaccggatggattttgccctgcggccaacggtattcggggaacggtttgctcggatcaaatgcgtcagatacttggacgggaacagcaccatctgccagctctgatgatcccggattaaaaaatattcctgttttccttcccagatatgttccactgcatatcgtgccattttgctcaccgtcctttcctctaacgctatacacattatacccacttcatgttcaaatatctattcatcaataccaacaatctctccaaaaccgcccccaaaactgtactaaacttttcccctaaaagcgtctggaaaataagcacaagcaacaaggctggaaagagaattttgcctattacaaataatactctacacctttccggctgcggatgaaatcctgtacctctttcaactcttctgctatccggcaggacggaagcgcacacatcacatcttcgtgatacttgccgccttttcctgcccgaatatctaaaatagacaccacacaagtatcagtttctgtacgaatggctctcccaaatccttgtcgcagtttcttctgcatatccggcacaatgatagactgaatataggattccagggaatcataggtttccttctccgcttcactgataggatctggcactgcaaaaggtaacttcacaataatcagcgaagacaccatgtctccggggaagtctaccccttcccagcaggagccggctgcgaacagcaccccattctccatagtcttaaaacggaggatttcttcctgcgaatgcctccatacttccaccatgggaaatggcaagctgtctcttaaaatctggtacacacttcccataagcgtataagaagtaaacagtaccagcgtatgtccgtaagtggaacagatcagggaatggatatgatttgccaccatcaatgcctcttccctgcttcctctcctgcaatgctccaacgtctttggcaggtatagcagacaattcttttcataggaaaaaggagactctgccacatattcctgcactcctgcccttccttccagcccggtgatctgcctggtgcgtaaaaagcctgttcctgcctttagtgtcccactggtcaagatggcggacattccttcttccctgttccataacatcttccggagcagtcctgggatttcccggctagctgcacacaaaacgggaagctgctctgtatccaaatgcagataacgaacatatttctcatcgctgctacaaaaacactccagcacatcctttgcttcttccagccgattccatatccactttggaacacttcgctccagcttttctaaaagaaattccagcatctctacgccttcccacagagaaaccacactatttgttgtatcatggaatgtttcccgaattcctttcccaattcggtgttctgcaccaaccacatgcaatgcgtcatacatgactgtccgcaggattcttgcctcttctttctgatgctcccgttccagataatacgctatttcccgaatatcatccatacacaggttttttccaaacatctgccttgccgcttctggtaacttatgagcttcatctacaatcaacgtccgataatcagacaataaaggcttgtatccttctgctctgtgatacgcatctgccagtaaatagttgtgattacagatttgaatgaacacatcctgtttcctggattcttccagatatctctgatagcggcacatctgcctgcccggacattctcttggacagaattttggcacacagaccagccttctgtcaaacccgctcagattctttacgctatccatatcatattgtttccgcaaggacagtagtgcttctttctgggcagcattcttatgtttatggcggattgcttcaattcgttgttccagcctagtatcacaaacaaagtgttccttcccttttcgcaccactgcccgaagcggggactgaatgattccttgctccagcagcaccctggacaaaaagggaatatattccgtcaatatagctttctgcaatgcaatgctggaggtggacaccaccaccgggcgctgttccaatggatttcctcgccctgtcagcatggaatacttccgcaataatacacaggctaccagataggcataggtcttcccaattcctaccccagcatcacacaaggcaatctgctctcccagcagagtatccagcatttcatggcatagacggatctgctcttccctgactgccagtccctgttccggaaatagcacccggaagatcttctccacttcctgatgcgctcttttttgatattcaactttataaaacatagtacttctttccgcatggcgttaataccacaagaatacggctgtgatattttcccacagccgcatgtatctgatatcaacgacacactcttttttgatttcttatcgtttcttcttttctttagcaccgtatttgtcctcgactccccggctgccacaccacatctatggtagggaacatcacaggcggatgcttcgcttcgcaccgctcgcagatttcctgaaagtcttgctgattacaacttagagtccatcctcttcttttttgagaagaatttcgtatcattatccccctccgatgatcctggcgaaagacctgcaaaagtccattcacagctataaggagtcgctcagaatgagaacaggcaccgacagttttctcacgaactgatccgccatagtctttggccagacctttccataacaatcctgcagtgcttgttcccatccgtcctggcgcttatgctgtcacgcttctatctttgggaacgtacctgtaatgctggtatgtggttgtcaaggaacgaggggcaattacccctttcatatatagagccgatgagataccccatttttcttcacttcttcaaaacttttttaatttttttcttcaatcgctcaattcgtgtataaatggtcttttccgctagtcccatctgacctgcaatctcacgaacagaaaatccccacatcttcagaagtaaaatctgcagtgttttcttatccgactccaaaagaatctgtaataactgctcattctctacactgtcaagtaactgttgaatattaagcaccactgaagatggttcttccaattccctggtgtataattcttcttgattagaagaaaaatgttcccagaatctccgctccgcattaaagtcctgccagtctaattcacgaagtctttggattacctcttcactgacaccggattttcgcaaaatccgttcctcctgctccttccactgtttccatttatattcttcttttgctttatgaaatgtcacctttcttttcctccgatctgaatttttttgaaatcaaatcggactggcggtgaccttgccttctcataggcaaaagactgtatgaaccggagttttctccacaaaaagaaagatgccgcaatcctgttttgaattgcgacaccaccaaacgctgcatatgaagttaggtttttctcttttgtagctctttccggcacatacactgctcctttatgtcatggaacgaagcccattttttacataaagaagtagtatacaaaactaagctgtcatcagactgtctgttgtctgtcaaataactgtcagtttttctgtcatttcttttacaattataaccaaatcttaccatataaagagcaggctcctttttcagaaacctgccttctatgattccttataacctcttaaacaatatccaacctcttttacactgctgattatatgctctgcatttacatctacttttttcaatttctgtttcaatcgacgtaccatgcagtaaataatatttgtaatatccccatgtgggtactcctgccataccagttgatagatctgactgtatgtatatactcttcccggtgtagacactaacagatgcaaaaatcgaaatttagaaactaaaattttcgaaagcttttttgtattttatgtagccatagtccagtaataccagatataattaccaagaaaaaagctgcggtaggaatagaatgattttttactataattgcaattatcccagatactaaaacaccaatccctacaaataaaacaggttttcctaattcttttgcatacctttttttattatcagtagtgtcaaatactttaccatgaacaaaagaataattcccctttaataaaaaaatgctcacgaatataaggatagcagaaacaaaccacatcattatactaaatcctatcataatatatcacttcctaaaattgtatttctatatttatagtttgtcactccattagcaacatcacaataaaattttatgcactgataatcttattgaacagctctagcagtgcatctttcacatcgccggtattgaataccaagccgacagcaatcaaattaactacaaaaaaccgataagtttgaaaaactcacgcttgaaccctaagtagatatcgataaccacaatcaccatatcaaggcccattcaatgatagtaaattgatgggtttgttttcttgaaaatgctgacagatgctgtgttttagcggatagtcagatttttattatatttttatcacaaaaagcactcccctgttacacttcaggacttgttcttttattcctaatctgcttttaaacaatatccaacctcttttacactgctgattatatgctctgcatttacatctacttttttcaatttctgtttcaatcgatgtaccatgcagtaaataatatttgcaatatccccatgtgggtactcctgccataccagctgatagatctgactgtatgtatatactcttcccggtgtagacgctaacagatataggaaatcaaactccctttttacaacggggattcttttatgctcccattctactgttctttgaagtggaaggatttccagtttcccaaccataacaggaatttcttcttttctttccgatttccactctgtatagcggcggatcaatgcatacgcctgcaggctgatttcttctgtacacagttgcgtcaatactacatccgctccggcctgaatgatcttatttcgcatttcagaatgatccggtaataaaacaatcacaggtgttatcaccatttttcggatggcttctacaagttggcatataatttccggttcttgctttaccgcaattaaaatcaaatgataagagaacactgtcaagtgggaaagagcgtcctgaatattttttgccagataaatctctgcctgctgttccggtaaaaccaagccttcccatagcacttctccttcatcagcaattactataattctgtttttcttcacacccctatctctctgcttctcatatcacaattcctccacatgattttctgtataatgataaaaaatagtttccagttctttacaacaccggaagaaatattcactacacgttacattaatggttgcttcatctgccatgagactcactttttcaaaacatggtctgccatcaacttccagctcctgcaattgatgctccataatccaataaatatctccacttctaaaaggtctatgagaaatataacggtaaacaaatcctttctttcctgcattcgaatttaagacctgatgtgcatattcctcatactctccgggaatcacttcccataaaggaattacaacttcagcagtttcacttgcccttattactttcaatatatcgcgcataacaaaaggcggcatgatgcacatatctttgattttactgcgcgcaatgtgtcctcttccatcattcccagaccactgaatcactctatcacagatttcatacccttctgaggatgaactgagcagaattacattcatataagttgacatctctactattaatcttacggcgctttgaacctcgttttcttccatatcttgaaacaaactttgaaatatatattgttttgaggtatcagcaacaagttttatcaaaagcagtaattttttctctcccaatgtcaattcttctattccacaattctctttcatttccaaacctgcaagttccagcatcgcttgaactgaaagtggatctttttttaatgtgggaagattagaaaaatattcccttacctttctatcttcccccccccaaaaaaaatcagtaatttttgcaaagttttcaattttacaatccaatacagcggataaaaatgaacatttttgtgcttctttttctgtatcgatcacaataccaataacttcatactttcttttcattataagaacacctcttttctatagcttaattgtaaaacacaaatgtcacagaaatgtcctaaatcataataattatcacatttattgaaatttcatatcaaataaatttctataatggcacacaagaatccattgattcattcccattttttatttataggactttcttctcttccatatctcaaaaatactcaaaacagtccaccggactgttttatcgcatgcatggcaacttaaaaatggcgggctttatttacaaaagttcttttgaaatatatctgcccgccaatctcatgtaataattattccgtcactctgatctgctcaacaagagattgttttctcagatttcccgttgtataagaaatcaagataaactgtacaatcagcaggattgccaaatatagcaagataaccagccaagggaatgaataatcgaaatatggattcattgttttaactacctgtacgcatagaaaaccaagtccagctcccaaaagcaaggttacaagtgtagcaaaagcggaatacagcactccctcataacacagcattttcatcagttgctttttacttaagccaatcgcctgtaacattcctatttcctgccttcgcgataaaaagttagtaattgtcgtattcacaaggttgatgaaagaaaaacacacaacaatgatggctacaatcagcaatgctccaaaggaaagctgctgattcctgctgtaataagtgatactttcttctatggtatccatgaccaaatcactatttccatctatcagctgatttaaggaagcttcaatcgtatcagctttatcggtttccgttattaccgatatcgttccagaacaatccatttcgcacgcttcattcataagctctgctgacatagcaaaacacatattaaatgccgggtgactgaaattgctgacaattcccatgatcgtatagcttttggttatggtctgtccagccttcgttaaaaaatcaacttcgacctcatcaccaagttgtgcggacagtgataaattttctgctgtatcgtttatcaaaatgatgccattttttgataccaattcatggtaatcaacggttccggcaatcaagttttcttccaatacggaaacatcttcttttgcaaatccgtaaatccagttgtcatcataatcattgacacgatattctgcgtctgtgtaataccagcgcttggttcctgtaacgccatctatagactctattgcatctacaagatcggcatttagtaaatccttttgctgcaatccagccaaagaaacatcggcggtatcccaagattgatttgcgttaagctgaatgttaaattcaccaacaggaaactcccttcctctcgcctctgcagcgccatcataagaaatcaacatggtggaaatcaatacaactaacactccgccaagggaaagggaaagtattgttaaaatggattttgtcttttgtctggacagattccttttagcaagtgaagcaggggttatattacggtgcagcacagagctttctttcatctttccctgataatcggaatatcgcaaggcttccatgggagagaccgccgccgctttttttacaggtgcgtgaatggaaagcatcacaatcataaatgcaaaaagcccaactccaactgtcacactgaaagtagtcagcccgtaccagccatcgggaaccagaagatagccgattacatttccaatcaccaaacctatcggaataccaatagcagccagcaattttccctctcgataaaccatttttttaatctgtcgctttgttgttccgatggtgcgaagctgtccataattccgaatactgcttgccactgaaatataaaaaatcgaataaatcacaatgccggagccaacgaaagttataaagccgatcaagaaataaaacagcatatcacttccacgattttcatcctttaaattgaaataggtagaacgaacaatcacattctcgttggaaatttctaattgctgtgccagagcatttgcatagctggcagtttctccttcactcatatttttagcattcttcaaaccgatatagtaatccattactatattacttccagactgctgctctgccagttcttttgatataatggcggtatagcgtccaatatctcccgttttcacatctaagattcccgttaatttgaaatcgtgggtagtgccatccgaaaacggaatgttgattgtctgtcccaattcattggaatagcccaagctatccaaaaaggattcctgcactacaatttcatcttccgaagttggtaaatctcccgaatagggcatactttgcgattttagcatatctgcatttgcgtaagtaaaattaacggttgaatgatttacctgttcagaaaatgcattaaaaaactctcccacccacgcaatttctttttgattgtacaattccttcccctgctgttcagaaatagcatgatatacgatctgcgctgtcttttgattaagtttttgtgtttcctgcggcactccaaatccataaaggacaatggcagacagtaatgcactggcaagtgcaatcgtcaaaacaataaagatatttctttttcgatttgccgatatattcctgcctgaaatacgctttattatggtttttgtatcattttcaaaaggtagtgtcatagaaatcaactcctatcttactatttttccatcttcaatcctcacaatgcgatcagcaagctgcgcaatagcattgttatgcgtaatcattaccaacgtctgatcgaactccctgctggttctctgaagcaatcccaaaacatctgcactggttttcgagtcaagattgcctgtaggttcatcggccaacacaattgcaggtttagcaaccaaagcccttgcaatcgccactctctgctgctgaccaccggaaagattattcggcatactttttagcttatcttccaatcccagcatagcaaccacttcgtccataaatttctgatctacgatatctccatctaactctaccggaagaacaatgttttcatagacatttaaaatcggaaccagattataattttggaagataaaaccaatattcctcctacgaaaaatagtgagttgctcatcattcattttagccaattctttccctgctacgaccacacttcctgatgttggagtatccaatcctcccatcatgtgaagcatcgtggattttccggaacccgaagttcccaccactgctacaaattctccttgctcaacagaaaaatttacaccatctaaagcacgagtaatgttcggttctgtgccataatatttttttaaatcctttgtctgtaaaatactcatattcaaagactcctttcaatgctttctgctctatggttaaggccattataataaaaattgaagtacagtgttacaacgctcagacatttgaatattagtctgccattttgattcgttccaccaatgaatttctgcattgaatttttagacagatagcagaaattgcaacggatattattactatacaggtaccataaattagtaatggaataaaaggaaaagtatattgaaaataagttaagccattcgcagacaatatcctcaccaacaaataccccatcaaatttcctgccacaactgtaataatcaaacatggaataatcaataagacactttcatgcaacagcattttctttatctgtttttttgtcataccgatagactctaatattccaaattgttttctccttgtactgatacgactaatcaaggtgtttgtcagattaaaaatgctaaacataatgacaaaggcagataccccataaacttgtacgccagtattatgaatcgtatttgccgaagattcttttacctcttgtaatgtttccattaccaaatcaggatgtcgggacagtattttatttaatttactttctactgatttacccactttttcatattcaggtacagacaaagttaaggaagctgttaaatccatatcgccccacaacttttctatagtttcttttggaagataaaagccctcattcatactttttgcggaagtaccggcaatcaaaacatctatgctgtgttcagttccatcaaaccatcgtaatgtcactttttctcctgttgacgggcaagtatgatagacttcttcctgtacgcttgtccctaatataaccatagcgtcttgttcgactaatgtttcgtatgtccaatcaacaggaagcgttttcagaatttcctcctgattatcaggcgtaatcggaataatgggaatttctaattgttcatcatgatactcaataatagccgctgttctctccgtagcataaatctctttaacttctgagatttgtttcaattcttccatgagttcctgcgaaaaaggcgtatcaacttgatactctgaaataccatagggttttggattgactaatgtattgtggttaatcgtaatataatattctccatcttccaaattccccattcttgcaaaggagtctggattccatgatgatataaaggtggctcccaccataaataaaatcccaccgattacaagcgagacaatcgtcaaattgtgtttttttcgatcctgcttttcactcaatacggccaaagaatagggtgagaggcgaatatgattttttctgttccacactttactttcttttagttcttgagcatctacaacatatcttgatgcttcaataggagaaatatttgaagctattttggcaggcttataaacggaaatttgtacgacgataattcccaatattattgcgaaaatacttgtggctatggtattgataatcgttattccattcggctctaacaaatatgcaaatataataccaactgtaataccggcaggtattccgagtaggcaaaaacgatacccttctttacgaatcatccgtttaatttgtttttctgtcataccaatagttttgagctgtccaatctgcgacacttgatttgataccgacaggtagaacacactgtatatgacaattccgcttgaaaatgcaataaaaagagcagctaaaagaacacctctcattcctgatccactaataagcgaggaacaaaatttactattaaaataaatttgattcctacttatgtcttgggatgaagccaaacgatataccgtattctcaaaatcaataagtcccatttccgttgcgccatttacacgaatcaaggcactatatggaatatcagataataacacgccccgctctgcatacgcaggggagacataaaagaaaaatgttcctgtttccacattatcagtaaaaccagtaattatgaaatcctctgttttactccccatcgttggtaatgtgatggtatctcctatatttagctgataccccagctctaattgaacatttttatcgattacaatttcattgtactgttctggacaggctccactgactaattcataggattttataattccaaaaccagtcggcatataaaccgcttcaaatttgatcccatccatcagaaaactatcgctatgcttatagggtacaatatcttcaagatcaggttcttttttcagaacttctatctgttctgctgtaagccctccgatggtaacttgctgcatttgattcaaaatcttttgttcactaattttgctgccttgttggaataaggagattcccacaatcaaactaattgccagcacaatggtcaaaacattaaaaaagcagaaaatacgatttgaagatacattgcgttttgccaacttttttgtaataacgctggtatcattttcaaatggtaaagtcatatccattcactcctttcgccattatcctaactcccaaatgttgcagaaatgtcctagaattctttttttctaaaatattttaaaaggcagcctgataaacagaccgcccgattgttatcgtttgggaagaaatgtagaaaaagttgaaccttttccctcttctgattcaactgtaatatagccaccttgcatagtgataatctcacgtgccagatataatcctattccaatcccatccacatcatgtacagcttcttcccgataaaatcgtttgaaaatagttgcctggacactttccggaatgcctcttcccgtatccgttacggcaatttccagatacatctcccagtcctgtaccgttacgtgaatattaccgccttccggtgtatattttactgcattatctaaaagattaaacaaagcctccgaagtccagcggctgtcatgtgaaactgttaaattttcaggacagtctacagataaatgaaaatgttttctttccataggagcaagaaccccattgatcgcatcgacaagtgtatccgcaatagctgtttctttcttttccagggtgatcacacccgtctctaatcgtgatgttttcaccattccctgaatcaaaaaatccagtttatctaactgactggcagtagcatgtaaaaattcctcacgtgtctcttctgaaatctttctggtcagcatcgtgtcattgagcatttttagatttgctatcggtgttttggtctgatgcgaaatatcagataccaaagactgtaattctgctttttcttcctctactttatgcctggtttcctgcatcacatgatatagcctttccaggcgatggctgatgcgcgctaacagcgtttccgcttcataatttatctgcggccgaacggtactatccatcatttcatctaatgtccgacatagcccatctgtaaataccgatagtttcttttgaaaataatgcaaaaagattacaccccagaaaaatagaagaatcatcacactgaaaccgccaagtatcacctttatatcttttgtgaaggcataaaggatgaacaacaaaagaatcgaggtcagagaagcgcctcccacgatcagccgcagaaaagttctggttgataaattctgtaatttcatcgtgattcaccgcctatccattgataccccattccgtaagcagttttaatatattttcgctcatctgtttcaatctttttgcgaatgcggctgatgatcgtagtaagcgtatgctcatcgataaaatccccatcaacatcccacaatttctcaatcagttgccgcttcgttaatataatgtgcggattttttacaaacaaaaataaggtacggtattctttaggtgtaaactctatcgccttgccctccagaactgcactctgctcggaaaagtcaattttcaaaacttcatcctcaaacacgtcatgttttggtgtccgcaattccatatttgcaaaaacagcggctacctttttgcagagaaccatcactgaaaatggttttgtaatataatctgtgcatccggcttcatagcctttcagcatatcaccttctttatcatttgctgtgataaacataatataggtatgctgccctcttcctctgatctcatcacataaatgcagaccgttcccatccggcagattaatatccaacagagcaatatcaaattcactctttttcaatcgttctactgcatcctgaaaactgtatgcagaggctacttcataaccatctgcagtaagattataagccagcgttttatttaatactttgtcatcttctacaattaaaattttcctcaatccagattcttcctttcccatcttctaaacttatcgctattttaaacctcaaatgttacagaaatgtcctaaataccgtttttctgatgttcatcattccaaaacatagattgattatatcctattttctttcaggaaaaaatgttttccataaaaaaatgcttttgctgaaatattccacacttttcagcaaaagcacttttctcttattccattgaccgcatttgttcaatcagggattgttttttctgtctgcggattgtccaaacagataaaataagctctactgtcacaagtactactacatatactcccatctgcaaccatggaaattcgtaaggaaggattcgtccagcgtaagcactgatactgaattttctccataccagaagcgtaattggcagtccaatggcaagcataagcaaaatactgctaaccacataccccattccttcccataccgtcatttgcgctaattgtttcggcgctaacccgatcgaacgcaacacgctattttcttgtctgcgcgaatattgattagaaagtgttgtattgataaggttgatcacaccaaacaaaaagatgaaccatgaaatcacctgcattacaccatatgctacatccatatacccataactatctaccttatcctcaaaggtatctaagccaatatcggtatgcgaaacaacaagattctccaaagcctttcccactttttcggatttctccggatcgcagacaatgtcccaagagtaatcaaaattagttacatctggtattaattcctgaaacagttcttccgacaaaaacatcattggtccatccactccgattggaccatgtccactggcaaaatcagttttttccccatcaaaaaatcctgatatggttacaggaattgttttctctcccaatgaaagttctatggtttcccccaatttctctttcccatcaaaatcacgataatcgtctttcaataaaatactattgtcgcccggcatacttccttctacaacagcttgtgccagaagttccttattttcgttagtaatcatgtcgcaagtaccgcgagcagtaattccaccaaaagtagctccataacttgcagatttccttgtaaccagaatatcttctactccatcaatccccagaacttcctgtttcaattcttcattcaatggatttccctgtttgagaagatcaatatgttcccgatccgaatcaatgtaaatcttataatccccatttttgaaatgctgtcttgccattttttccggggattgcagaagcaacaaagaactaacagccaaaagcagaatcccgcccaaacttagcgaaaacacaatactgactgttttcttccaatccctgcgaaagttcagcattccgagagaacaagggctaatcttttttctcttcgcccgattttttatcttcttttgaagggaagtaaaacgaactgcttcaactggtgagatatttgcggctaatttcacaggttttcggatagacagacaaatcatggtccagcagatcaatactgtacatccaatcactaaaagatagcctgaaagagaaaaacctttgggaaataacaaaagtgtcactcctaaaccaagtaaaatcccgatagacatgcctttccatcccaaagagtgtccctctttttttacaatacgcataatctgctttttggtagcaccaacagtccggagctgaccatagctttttattttatcaataatggaaatacggaaaatactttgaattacaacacagccacctaccaaaacaatacctgcaaaagccataagcaacaaaacattctccatggaaatgtctccgtcaatataacggaaataagcatcatgaaaaccgactccaggtatctgcaactcctctttaatcttctgaacgtaagatttgataagttctccgtctaactgatttacatgattcagatgtacataggcaaagtatccgtcaggttcatactttgtacactgctccagcatttctttggagataagaaaagagtaaatattttgtttttcttgccctgttgtatctaaaatacctgaaatagtatactcacccgaaaaactttccgtatccaaggtaactgaatcaccgatatgacagtctgggaaaaattttgaaagccattctttacttactacaatttcatttttctcttccggtaaatctccatctgccaaattcatttgggaacgtgccatatatagagtttccttatccgtataagcaaaaaatcccttaaatccttgtgtagaaacttcctccccgtacatatagtattctcccacacgtgcaaattctggtacctgttttaactcttctatatgtgtttcatctacctgtacataagttgcttcgtaagtatccatcactttcttcttttctgtttgcatcagtgaaactccagccaaaccagaaagactgattaaaaaagcggctaaaactaccgatattattaccatgatatttcttcgcttttcgctttttaaatttctcttcgccagattcttgacaattccgtttgtattattttcaaaaggccaagtcatagcctgccacctccttattctgttattttaattcgctctactaatgattgtttccgtatagaacggatggcgtatattgagtaaagtgcctgcacgaacataagtagtacagcaaaaacaagcaattcccagatcggaaactgatatactaattgtccgaagatttctgttctccctaaaattatcactaacaaaaagccagccaaaccgcctacgatcaatgtgattaacaaggttacggctacatagcagaaacattccatggtcaacattttagaaagctgtttatcggataaccctactgattgtaaaattccaaattcctgctgtcttgcaatcaaattggtcattaacgtattgatcagattgaccagagagaagaaaaacagaaaagcaagaagtccgtagataaacatcataatatttttgaattgggcttctagctgttcggcataatctgaccgggaaataatattcagtagtggatcgtctaacagtgaataaagttctttacgcaaagtatccgtatctttgtctgtaaaaacattccaaacctgttccatattttttatatctggataaagctgtttagccaaatcctctggtacgctgaacagtcctatccccgtagtctttgtaatatttttgccgttcgctatgcccatgaccgtaaattccataggttctccaccataaggttgaaaagtcagtgtatcacctattttaggctgatatcctgaatacatcgtagacaaaggcttctcaatatcatcggttacaacgattccatgatttttgactaattcatcataatcagcagttccctccaacaccatctctggaggaagcaattcctgctcttcctctcttgtaaaggtgtgcagataaaaatctgcggcagcgccatttggcaatgacacaaaagctgaggcagaagtacgggaatttatagatttcactccatctactgctaaaattttttctttaagctgtggagttaaaggattattccgactaatttccggaaacttttccaagtccgcttcccattgaatcgtataattacatttttcatacatttgaacagcagccatatttttggtattgactgaatgaactacagttgctgtactgaacaaaaagactcctgccattccaagggaaagcagcgttagtactgcttttttaggattccgacgaaaattcataacagccagataacttggtgacagttgttttccagatttttgagatgttttctttgaacattctgcctgatagccactagctcggactgcctcgattggcgatacttttgccgcaagtcggataggcgcatgagaagaaattctcacaataagttctataaagaacatcacgcccaaagcaattataacgttcgcagtccaatcccaataatctggagcctccacgaagcctgccactccaccgattgcaatgcctattggaatactgcaaattgataaccggaaactttctctctggataatttttcggatctgtttaggagtagttcctaaaacttttaatcttccatattctcgaagttttccccggatggaaataaagaaaatgctataaataactaatccgcaagcagctaaaaagatgagtgcaatgggaatacaagcatatacaccatcggattgaaaactgcgaatatcaaaataattggaactgtaaaaaattcggttctcaggaatattatgatctgctaaaaaagctgcaatatctgatttcagcgcatccatatctgtacgatctgcacctacgaatcgaaaacggaactcataaagcggctctccttttgcctgtgcttctaaaaaagcttttgacactataacagaaaacattctggaattattttccttttgcaaaataccagaaatgatataatcctgatctccgttgcctaaattcaaacgaattgtctgtcctgtttcctgtggcaatccaaaataatctaaaaaggcctgttctacgataatctcttgttctttctccgggaaatttccaacataagaaggttttttccctaacttcatccaacccttatccgcatatcccactacgagagtactatcttgataccgggctgatccaaaatcttttgacagtccccactgctcaatttcaggctgcgtagaaagatgttcgatttctttttgtgttgtttccattactactgtttgatactgtcctcgaagatctgataacatcttacgttgttctgcaaaaacagtaaaaaatataccagacaaaagagcagttgttaatgtaatcgtcacaatcagaaaaatatttcttctcttatcagcctgtagacttcgctttgccagttttcttgtaatagcgttggtattgttttcaaaaggccatgtcatatgatcgcctccttaacttacaatctttccatcctcaatccggacaatccgatccgcaagtcgggcgatctcattgttatgtgtaatcattaccaccgtctggtgaaactcataactggtccgtttgatcaatcccataacatctgcactggttttcgagtcgaggttccctgtaggttcatcggcaagcacaatcgcaggctttgcaaccaaagcccttgcaatcgcaactctctgctgctgtcctcctgagaggttattcggcatattctttagtttatcttccagagccagcatatgaaccacctcgtccataaatccctgatctaccgtatctccatccagttctaccggaaggacaatattctcataaacattcaaaatcggaaccagattataattttggaaaatgaaaccaatatttcttctcctgaaaatcgtcagctcttcatcgtttttctttgccagttcttctccacgtacaataactcttccgctggtaggcgtgtccagacctcccatcatatgaagcatcgtggattttccggaacctgaagtgcctactaccgctacaaattctccttcttccacagaaaaattcacaccatccagtgcctttgtaatattcggttctgtaccataatatttttttaaatcgattgtctgtaaaatactcatattctataagctcctttcttttctttcgataggtttattataaaacacaattgtctcagaaatgtccgagaccagtaacaaattcaaggaatttcagcctgaattgttacaaatctcggacatttcaaaaattactcaatttttcttaaacgagctactatacttgattttctaaaataatgtaaagaaatatacggaactataacagcaacaatacaaataacgattccctctaatatcaatgggaaaaccgtagattttatggtaaacagccataaatcgggttgattgaaaaaaacaggaataacagtattggaaataatatacgaaagtggcaaacctactaagcaaatcataagtgcataaaacaatccctctaaaacggtcaagttgttgacttgttttttagtcattccgatgctttccaatgtggcaaattcccgttgacggtttataataccggttatgattatattagaaaaattaacaagtccaatacttcctaatagaaaaccgataagtcccccaatgatgaaaatcgtttgtttcaatccgttcatagtttgtgcaaggatttcggaagatgtatattcaacggaattcaaagaattgatgtactcgtttgctgctaagaagtgttctttttccacatcaaacacataactcattatcgctggatcattatacaattctcgaaacattttattgctcatataaaaaatgggacaatctccaccgacatcggtgtaaccaacattctttccaggagattccaccaatgaaaagtcaacagttgcatgtgcaattactgaaactgttttatacggaattccattcttataaatggaaacttcctgattaagagggcataaaaattctggagattcatttggattaattgctgaaatttctataatataatttccactttttaaatatgaatctagtcgttgtatatctgtttctccttcgataaaattcaatttgggaagtattgcatgttctaccccataaacattacaaagaggacggtaatcggctccaagttttactggataagtccttccatcaaccataccacttcttataagatgttcgtcttctgtgtattcatccaatatttctgttacggaacttccataatcataagtaatactatcatcatctaaagtgtttttataaatacgactaccgttcagtacaggtatatttttctcaatatcagacacgatttgctcactaacagaatcatctttaaatcgatatccttgcacattagaaaacgtatttggttttgcaacaacgaaatcaaacgatgtaacagaagatacatatttttcaacatcaacactattgccgattacgattgcactgtttaagagaataatgcagagtatcattgacatgacaataaatactgtacgctttgaatttctgcctaagtttctccatgccatttctgttattctactcttagaaaaaaaatcgtttctgctatgaatacgattgttgtttttctcatagtatctgcttgcttctatgggagaaattgtagcagcaattttgaatggtttctttatgcttatccaaacagttattgcactaaatatcccagcaataataaaaataatcggatcaaacctaaggttcacagaaagattatgatactctcctttcataaaattaagaacccatggaagcataagtatccctaccgtatatcctaaaatcaatccgatagatatgccaatgatagacagccaaaacgcttgcctatagataatacgcttaatctgtttcccagtggttccaattgttcttagcagtccatatttcttaatttcctgaacaactgaaatttcaaatatattatgaataagtaaatatcctgttatcacaaaaattataataaatagcaaagctgatattatcacaatccaatttacagatacatcagtaggttgattattcccccgtatttgaaaaatagctgtttgtatcgactgagctgctccaatgcataaagttgtgacagcggtaaacagcattgatgttaagataatcgctattactgcaacagcattccgtaatttgctggttttgaaacttctccttgccaatttttttataataacacttgtgtcattctcaaaaggccatatcatagttgtatccacctccctaattgatgccaccattataaactttaaatgtctcagaaatgtccgaaacaaagaacaaaacgaaaaaattttaaacggaattgttataaaatccgaacatttaaaaccataatttgtcagaaatatcaaagcaaactgccttttaatccttttttgaaaaccaagacagctttttcagctccccaaaatgacatggttacaagtttgtagctttgtttttccatttctataagtttagcatttattttttcagttacattttcagtagtaatattttctattaaaacggtttgatacatcattcaatttcctccattatttagtatccgcttttccataaaactttttaaagaaaatttctggtaccagaatactgcctgcaagtaaaatcatcagtagagcaaccatttctttgattggataagaaaaaacaaaataagatatctcggttttcatataccatccaatcccgcaaagcaatattgtaccaacggtcaatatcagaacactcagcaacagccaggtaaaaattccttctgcaaggaacatccgctgcaactgctttctggtcattcctacacgattcataatggcacattctttttttcgaagtaacatgtccgttacccttacatttaaaaaattcataatcccgataaaaatcaggcatccactgattaccagaagcaacagtctgctggtctgaatatactccgattcttttaacaagaggtctgaccgacactccatctgaaataaatttaattgctctgcatatccgttttcagactgaaattccatattttctgtttggatcattccctttaatctgtttttacagcctgattcctgttccttttctacagaaaaactcatttcaaatgtttgtggggtaagattctctgacaggttttcaaaggtttcttctgttacaagaagaaggttggtatttctgccatcccagcacaactctaattccggaaatccttcctttgtaatatccagatatccgcaattgaccagtgtctctggaaccagaccggacatatcggttcccaccggtaccagatcatacacttctattgtatttccaagctgctccaatgcctgctcttctgcatattctgacactctgtggtcatggagaagaaacgttccatttccgtgtgcaaatgtttcccagtctgctgtcatctcctgctctctcagaaattcctgcagtttttctttttcataagaagaaattttttgaatcacagtcggaacggtttccccgtcatttaataacttgatgctatctctcccattttccccaacaatgggataagatccctgtatctgtgtttcgtcccgcaaactatttcctgcggtctgctttatgttctccaagaattcattcgggaaaaagaccatattttctgtatccggggaagtttccatcagtgtgctgcaggcttcctgagtgatgcggatttgaaaatcaggttctttcataaactggttttgcagatctaccccctttacaatcacagaagatccaagcgctaatccgcatcctatggtcagagaaatcatggtgatgaaaaaagcctttttgttgcggaacagatatctccttgccagataaacttccggagcgtttccaaaacttcggaaactggcattctttttcttcgtttgtttcttctctgcaatagtaccctctccatagttcatacattccagaggactcaaaactttgattttttgccttaccagaagtatcacaacccccaaagtcattaccactggaagaatggctattagaaagaacacaggctggtagaaagaaatcccctccagttcttctgcctgtccaagatacaattttccaatgacagcgggcaggactccaagtaccaccaggcttcctatgacaacgcctgcaaggcttcctgtcaagacaactttcatcatctgtcggaacatcatttgtataatctgatgctgctgtaccccgactacttccatcagaccatattgctgtaagtctttttccaatgataaattcaaaatattatagatgaacaaaaacatacacaacagaatcagaaaagaaaataaagttgcaaatccataacttcccagcattccttctactgcccggtatgtagccgaatccatgctgacaatccgctgtccttcttccaaccggatatcttcctgcaactgttgttccatctgcataccactaacagaatcattttccggtttcagcagtatcctgcagggatcccatccagctccactttctttcagtttcttctcggataaaaatgcaatggaagaacttgccccctgattctgatattctgtaaaatatccggaaagctgaaatgtctgctgtccggttccttttgtttgaaaaaggtcattccaataaaaatccagttttagttccattcccacctttggttccgaaattcccagatactttaaggttttgaccgaaagcatgatttcgttttcctgtttgggatacgttcccacgatctgtgtataggccggacagagcattgtttcaaatgctgtttcatctgccacaacacagtcgcaatattttatagtttgattgaatagttttccggcaaatttttcttttcccgtctctgctatgtaggagagcgtatgcaactgccctgccatttcttctgtaccattttcaatatacgttgacactgtcattccatctgtccggatatgtttttggatgtccacctgtattttcccataggcaaagcttactatacagaaaatcactcccacggtaagtgcaactgccagaaacaaaagacggtttttgtttcggttctgttttctgtaagaatccaaaagcactttttctgctggacggtgataatcatagtttttcatcttccaccacccttccgtctttcatgcggatgatccgatctgccatggcagcgattttttcatcatgggtaaccacaagcattgtctgctgatattgcctgcagatcttttttaacagttccataacagaggcgctggttctggagtccagatttcccgtcaactcatcccctaacagaatggtaggatgggtgtagacagctctggcaatggcagctctttgttgttgtcctccagataactcatccggcatctgaaagagcttctcttcgattcccagagtttttgccaaacggaaaacctctttttcatctactgtcctctccagtaattttgccggaagcataatattctcaaacacattcatggcaggaatcagattatatttttgaaaaataactccaatatgccatctgcgaaaagaaatctgttcttctaaagataattgcgtcaaatttacatcatgcacataaacacatccatgggtgggcttttccaatccgctgattaaatttatcagagttgactttccgcttccggaagcaccaatgactgcaataaactctccttcttttatggaaaatgatacatcatcaactgctcttatataattttctccatttcgatattcttttgtaagtgaaaccaattttacagctgccatagtatcctccatatatttctttatctcggcagaaaaatagaaaatgccgatccctttcccacctgtgattccaccgtaacgtagccgccctgctgtgtcacaatttccctggtcagataaagaccgattccaacacccggttgattatgaatctcttcttcccggtaaaacctcttgaaaatagatgcctgattgctctctgaaattccttttccagtatcggatacttttatctccacatacatttcccattgcgctacaaacacatggattcttccccctgtcggggtatattttaccgcattgtccaacagattaaaaatcgcttcttctgtccacttactgtcatgggacacacacacatcctccggacattccactgatacatggatctttttttgctctgcggaatataagattccgctcatagcctgcgctaacgtatcatatataaagtgatcttctttttctaattgaatcaccccggtttccaaacgggaggttttcaccaatgcctgtattaaaaaatccagcttattgatctgtcctcttacacttttcaagaactcattttgctcctgttcttccagggattttgtcaaaagtgtatctacaatcattttcatgttgctcaccggagtcctgacctgatgggaaatatctgacaccagggactgtaattcctgcctctctgcttctaccttccggttgctttcctgcaggatattatacagacgtaccaggcggtaatggatacgggcaaaaatcgtctctctgtcggatacattttcgggttcctgactgcggttcatcatgtcatccaagatctggcacagttcagaagtaaaatttgacagtctcattcccaacagttgtaccataaaaagcatccacagtgttgcacagactattaatgccagcccaacccataacactgcgatatttttggtcagaaagaaggagagcaatatgattgctgtcattgagaataccatgccggcagtcatccaaaaaaacatcttttttacagaggttttctttcctatcatgctgtttcacccccggtccatttataccccatgccatatacggttttgatatataccgttccatctgtctcaatctttccccggatgcggcttaacgttgtcgttaacgtatgctcgtccacataattttctgtgcagtcccatattttttccaacaactgctttcttgttaatacacgattgcggttctggcagaacaggttcagcatccggaattccaaagtcgataaggttaatggcttcccacccagcatagctgtctgctctgcaaaatttaaaaacagcctgccatcatcaaagacatcctgcatagctacatgatgccgcatcatacgcagtacattttctacttttctctgcagggaatggatggaaaaaggttttgtaatataatctactgctccaagttcatatcctcggatctcatcactttcccggtcatttgcggtcaaaaagattacaatggtatcactatatttatcccggattgtttttgcaatttcatatccatttccatcaggaagattaatatccaatagtaccaaatcaaacggttggctttttaatacttccatggcttcttttaccgtttccactgaaacaatcccataggattctgagtgtaggttgtaaaccaacattttattcaaaagttcatcatcttctacgattaaaatctgtttcattccttttcatcctttacgatcattttgctatcattccaattcttattttacaacagaaatgtcctagaaatgttacagattgaaaaatttatgattttctttttgaaatcttaaaaatcttttggaacgcaaaaaagaagatgtatctataaaacacatcttctttcagcttttaaaacattaaattacaaatccaattttatcatcaagatatcgttatgttctactttttcttccgagttagaactgctgttatatgtttatggaatgctaattgcttctacatactcacaataatttgatatcaattcgtaaatttcttcacattccaatttttcctgcattaaattcaatagttttagaccatttcgtacaacctttttcttcaattcagctcccatcaattcatcatttatcatatctactgtttctgaaattgtaatcgcatcattcttctctaaccctggaagcttatccttaatctgttttgtaaatcgatttaactttttaactgatagggttacatttgtacgattctctttatactgatatctagataacatatcgaattttatatttagaatagcagaaaataatttataattctctactactaacacacacaatttctctcttgcacgagaaatagcttgatacaataatttataaaataataaatctgggttgggatgttcctttccctgtatccttctctctcggtcatatctaaagttttcatccatcataatcataactttatcatattcctgccctataacgtgatgtgtatcataagtatttggatacaaatcaatagaattcgaataatacattgattgtgtataggatataaatgtatatcctttttcgttatacaagtcaattaactgcattgcctcttctgtgttatttgcaaataacacatcaatatcagaataatccatatatccccttgcacgattattcaaattcatcatagttcttgtgaaagaagcaatctccttactcgttcttattttatccgacaacatatactctataaatccatcaacttcttttaacttggctggaatatttcgattcacctctgcttttgataaagattgtacataatcatatgcaaaaatgaccgttttagattcagaaatcacttcttctaatatttttttgaatgctgatatataaattctttgagattcatccacaaatatatattgatacttttttaatctttccgctccatcaccatttaattcttttgccgagaaaatgtttacattttcccactgcgtatttagggtcttatgcccattacataaaataccactatggattaaacaacattttagaccttgttctgcaaccgtctttataatatcatataacaaaagtgttttacctgttcccgcttttcctgttatccctaaaatatgttccttatcatctaatagaatcaaatcgactatttttttctttatatcatgttgttgattcgtcaaaaaataatcaccagtcataaatttactcggtgtatttaaaggtgaaataaggtaattatttgcctgaaacaatgattcaatgttttctccaaggctcttttgaagcaactccatagtatcttttaaatcttctaattcaacaattttgactcctttagaggtatatttatataattcttttgtagattccacaaacgtatacaagcgtacatctggggctagatgttttaagtaataacggttcttttctaactgattttgaataacatctactcctacatcttcactttttaactcaatattcaaaacgagtttacccttatcaagttttatcagatcaaattcttttccaatctgttctatcgtaaaagaagcgaaaaaattctcaaaatgctttgtctctatatctatatccagtagtaaatcaacaagagtttttatcgcaacaaactcctgtacttttacatttaatttttttgatctttgtgacaaaatattttcgtattcagtagccatatcctcttgtatccttgaatatgtatatatatttattgctttcatatttcctcatcctctgcatatcattcaaatttatttacaaatcaatatttcttcccatctatcaaatcataactcatatccaaaaagtctaagattttcgcctcacttacacttccatctaacaacatggtgatccaatacttcttattcatgtgataccctggcagaaaaccgtaggtctgtgtcagaagtccaaccatatccggttcacatttcacattgatgatatctacggttccttcctctttcaaacccagttttgatttttcaactcgcagaatagctgcataccattttccattcttatgccggaggattgcactctctggagaactattccaaagatattccggaactgttccatattgcttttttacatattcaaaaatctcttcccgtttcaaatattccactccccaatgactctattttatcaatctcatgattgtacttttcatatttatcagcaagcaggacgtgcgccctgcccgcctttcctattatagcattgttcctctactcctacaatgcaatccgttctttgattttttctcactttttaataagctaccagcccataccccagaatcgactgggaattcaccgtatagctgttctgctttaccgcatctccgctgtttccctcaatcgtatgtaccgtagttccatcgcagctttctacgattcccacatgatcgctggatccatcatgattccaatcaaaaaagatgatagtccctggtatcggaacattcccgccactctgccattttcctttctcctgaaaccaatctacgcctgcagtacaaagggagaactttggtactgctcctttctgaatcaaccctgcctgatcagcacaccagctgacaaagcagccacaccattcctcccggctgtcaaatccataccatgaccagaacttctctccgccttcatttccaagctgactttttgcaatggtgacaagctgtccgtttccaaaaagtccggtaaaccaacctccgccggaataataccgcatcacatgaggcacatactccggatcaccataacccgaccagccatgggcggctgcctgctcctgggaaaacttcagcgcattggcttcactataaccgccaaatttttccgacgcccacgagatatatccattcccataattatacccctgccaactgagtttcagcttgtccatatcctgtgggctttggcatccggattcccggacacaatctgcataatactgtatccccaccttgatggaatagtcagcatcctgaatcgcaccgggggtattgggatactgggtgttataaggacactcactggcctgcatgggatcggttcccctgcctccgctttcctgcatcataatggcttggattgctgggacatattccgggattccaaattcactggcatacttttgaatggcaggtgtatgtgccagcacttctgcgcttaatgcctcactgctctgggaatttcccaaaaaggctgcacccccaatgatccccacaatcagaatcagaacgataaacactgcgcctccacctgccatcagtgctgcaaatgcagctttcactgcatgagcggcggcttctgccatggctttcaatcctcttccggttgcctttgcagtctttgcactttgcttggcagtctgaacagagtgcatggcagctcgtttcgcttccctgactgctttcatggatttgagtgcttgtttcttctgtaagactgcctgggttttcaccttctgggaagaaaccggagaggctttcaccacacggggcgctgtttttaccatccgatttccagcttccttgatcgttttctctgcttccggcttggccttaatgcttcttttggcttctgttcgccctttctttgcctttgtctgccctgcctgggcggatgtgccacccgttcctgtttctctgtccaaaggggctgtcgcagcttctctctgcttttgtttctgctcctttaacttctcataagttttcactgccagcttcttaccgccacgataggctgccgaagcactttcctttcccactcgctgttccacacgctggatgcggtttccggcatattctaccggggattcctctcccgtttctcttccgagcttatctgccatgatgctggacttctcttttgcttccagcatcgcagaacgcaccagttcctttggaagccgggaggcaggattacggatcttcggactttgatcccgcactttttctttgatttctttcaatcacacacctcccatcttttgtactttctaacgttcccttcctcgcttttttgatttcttctgctggctctccagctgttccagttcccttaccgcttcctgcaccagcggatgattggcataatagggaacataggataataactcttttcccttctccccggtaactaatggatattctccctcgttatacagaggatcctctgcatggtggagggaaaattccaaagacgggagcatctgaggggaacgtttacaaaatctctggtaatgtcggaatgcttcttttaaagatgtacattcgatacactcccccatcccatggaactccccgcactccgctgcaagaaaggtaatggttgtttcttctttcatggctctcacctccctttggaaaacttccatttatcgaaccgttgccttctgttttccttctttgccaagcttcaaagggtgttgttcctgtctcagtttctgcagggtatccttcacagacggttgttttccttctcttgcttccagcttccctatccgctgttgcaatcgctccgttttctgttccagcttatggatactccgcatagactggaatagcaccttctgggtttgaaagatgattccctgttcgggattgcgttctgtgagctttcgcacctcttttccacccgcttccagaaatgcattccgcagatgccctttggcaatatgtagttcctccgccatacttcccagacggtcaatcttttgatccatcgacagcatcacactatgtagagaggactgcagcatttgcaatccctgcgtaaggtgcattccctttaccgcacaggcaagggcatcttttcccttttctttaaagtctacaactgcctgttctgctcgtcccacaaactttcttttccattctcccacctgaaaacgaagtgtttgcacctgatgttccgccttctggattgtgttcaccgcaaagagtttgaccttgctttcctgcatcacacccaattgcttcttcacctctcccaattcctttaggacagttcccagctgcatttccatagaatcaatatagtctgccatacggagcacatcccctttttcctgctccatgccctgttgttccaaaagttccagcaatgcccggatactgccctgctcccgaagcggttctctcgtttcctggatttccactgtttgtccttcttccatttacattccctccttcccaaaaggatgctgccgaagaaattccaacagcaccctaaaaatatcttttcgactagcattcaccgggttttgttgtcatcaatcggtacaatttcgtattcttcggaaaactgttctcaaatggcaccagatttccagaacaccggatcagcccctttcctgcgcctacattagtgatataagataactgattctcagaaatgttcaaaagagaagccagttcatcccggtctgtggtcgcctgattcaagaggattaaaaactcactgtttgccaacatcagccttgcagtatccgacttcaaaagttcctctacgttctgtgtcaagcctgtcacgaatccctggtatttacggattctcttgtagagtcggtagaagaaatctgcactgtactgataacggaataaaagataaaactcatcggcaaagatccaggtggtctttcccttcttccagttctggattacacggttgaagatactatccaatgtgaccagcattccaaggggcatgagctgctcccccagttcccggatatcatacgcaatgatacggttcttcgtattcacattggttttctgtgcaaaggtattcaggcttccattgataaacagttccgaagataaggcaagccctctggcttcctcttccggctggagcatgagctgacggtacaaatctttcaaggtcggcacttcactctgataaccgcttcggatatattcccggtacacatctgcggtacagcggtccaggatggatttctccttagcagacagatttccagccccaactaattgttcaaataacgaaaggataaactccgacttctcaatcagcggattcttgtcattgccataagcggaatccatgtccaatgcatttaaatgggtgtttgatgtagcggaaattgtgatgacttctccattcagcgcttctaccaacgaaccgaattcagactccggatctaagatgaggatgtcatcttccgtagacaaggcaaggtccacgatctcttcttttgccgagaaactctttcctgaaccactgacacccaagcggaaggagtttccattcaataacttccttcggtctgccaccagcatatttttactcactgcattctgcccgtagtaaatacctcccggctgcatgatctcctgggtatggaacggaatcagcactgcagtagattctgtagtcagggtacgcagggcattgatcttgcggatgccataaggcagcactgtatttaatccgtccacttgctgccatttcaaggttgccatctggcataaatgctttcttgccacggataagatgctctctgtatccgagtccaactgctttttactatccgccatatgcaccatggtaaggatgccaaacatcatccgctggtctctggtggtcaggtcatccagcatctctttggtttcctttctttgtagttccatatcatagggtacaatggcagaaaagttattgttggcattctggcgtctctgccagttagtcacattcgtctccacgcccagcaaccggttctggatctcacgcaccgcctcatcggttggtactggaagaatgtcaatggacagcatcagatccctgcttaagtcacacagttccgaaatcatgtcatcttttacatagctggcatagtcctgcatatacagcacccgtccgaaacgctcattgatcttaaaacagtctttggaaaattccatcgattgggggcagatccaatccttgaaactgctccctcttttggcaaaagccttcatatcaaatggaaagcactggggctggtctgcctgaaagaaatcccggaaaatctgcaggcgctgttccgcatccagttcttccccaatggaggacagcttgctcagatgggtaatgatatccgttcccacacgggcaaaatacgttcttgcttcatcgatgttcttcttatggacactgaccgtcagataccgttcctgataaatgctgttgttcgtaccactgaccttagatagcagcatttcgttgtattcctttcggtattcattcagcccgtcctctttcataggcaaaagcagggaggattcaaactcttctttattaatccttctgttatttagggtaatcttggcagatgcaccagaatccaaagcatttaacagctcactgtaatccaagaacatttccgttttatcttctttgcttgcaatggcatagttgatatcggaaaatcgaaaggactttgaaaatttcgtaccagactggaatactccatccggccagatccgctggataggaattgcctgctggacagaccttggaactttaaacttctccctgtccatttttaatgcctgctgtaaggttttaatcaaacgcaccactccttcctgacttctttttctgcttcatccgttgttttcttgcccgctgttcccgctttttcaaaagggcggttccatttcccttagtcttttcccctaaggtcagcgtttcttccatgcaggcatggtacagatcctcgctctgaaacagcagtcgcttgggatataaaaattctgatttgatatatgcccaggcaaactgctccgcattcattccatggtactgaaagaaaccacaggctgcgaagggggcagcccctaagatacacatccatccggtcatttcctgtcccacatactttcctagtccaaaataaatccctactgccacagtgatggcgagcagggaaaagatacactggcgcaaattcagccccataaacatggactcctggtagttacggatttctttattcatttttacttccatatattgttatctctctctttctcttttctttctgcctgcaggtttcccttggattttttccggttcttttggcatatccagtccccattgtctgcaaaattcttccactccttcccggtcatacctggcaagtcttgaaaggtcaaatgccaccggagtatagctggcaaaacctgaatgggcttgttcctgcaataccttgcccagcttgttctctttgataaaagccagcttatccttggtaaaatcaccgcttacgaatgcctcctgcggctccagaccatatccgcccggaagattcaccgtcagatcatcaaataattccaactccccttctgtctggctgtacatcaaaatcgcaagcccatttccataggcatagctggacactttcagggtgatctcttcctctccaaatttccaatggaatggcaggatattgtttttcctctgagtttcctttttctcattttttgtttctcgcattgattttcctcctataatcccatcatttcccgcacgatccggtcagatgcttttaccgcacctaccagtaccagcaagttgaacaccaattctcccacataattccacacaatcgtcactgcgcttaaggacgtatccccaatggccggcggactggcagaatacacggaaaaaataatacaggcaagcgcaataatcgccccttccagacacactccggcataagacttgataaaattctttcccaccgactgggagggttctcccgcaaaagtggatatagggatgggcgcaatggcagtatacatatacagtttgaacatcctcccatatacggtaaggatcataataaaggacaacaccgtaatcaaaaggcttccaagaagcgtcacaatccacaagggaatggattccagcatgcccaccgcttcaatcttttccacgatctctgccggaagttctgtcacgccaccatttgtcatgcctgactgtgccatgatggtagacacaatcccctgcacaatggaaaacaacgctgtcatcagttccatgccatacataatggcgccttgcgccagggcaaaccggataaaggctttcagggcatgctccggcttcttcatgtccgtaaaactgccacaggtcttgacaatcccggcagcaaaaaacaagaccaacaacccatatccaatggctgtcagcactccgttgatcccggtgatgacgctccaaatatccccgcccttaaaggattccgggctttgggtgagaagtgtccagatttctgccagtttctcattccaggtgttcagtgcagagtttaggttctgcacgatccagttatcactcaaacagtttcacctccttcattggggcaggaaaaatctctccctgcccctttccgtttcttcctgctacccaacgatcaggtccaggatttcttttgcaaaggtgataataacgccacctgccagcgtcagaaacccgttggctctctggcttggatcgtggctctttaagctcaatcctacctgtaccacaccaaatcccaataagatcagaccgatggcccggatcagggaaaagataaaggtggataggttattgatgaccgccagcggatccccggcggcaagcaccggaactgcccctacggtcatggacagtaccagcgccacataaaaggcaaagggatatttaggtccttttcccataagtttcggtaccgtggcatggtttcctgtttgattctttggcatttcatttgttttcttcaatggcattcctccaatcaaaaagactgctcccctccgaggatttcctcagctgagagcagttcataatcatccagtctcctggtatcaatggttacatcttcatgagacaacggtgctttcgcataatcatagggaggcgcaccgccatcctccgtatatttcacattcacatgcttgtgcagatcatatttctcatccagaatgggacgctccccacgcaccaacagcaccgctttccggttatccaaaagccgcacttcatccggggtaagaagttcccttccagactgttggaaattcacagaataacttccgcttcttcccttggtctgcccgtaggtattggtatccagcgtttcttttcccagtagttctgagacatatttatgcccctctttttcattgccgcccagatataaaaattcatcgcaattccctatgagactttcccagctatccttaaacaaggctttcatctgcgcaatgttctggatgatgatgctgcaggaaattgcgcgcgacctcatggttgccagcagcttgtcaaaatcatccggcagtgccacgtttggccactcatccatgatgcagtgtaccgggataggaagtttcccatggtatttccggtccgccacatagtaaagggtttgaaagaggttactgtagatcatgcccaccagataattgaggctggtatccgcatccgggatacagcaaaacagcgccacctttttctccccgatgctgtaaagatccagttcatcggtacaggtcagattggcgatctgttttaaattgaacgcagccagacggacgcctacggagatcaggatcgactttgcggtctttcctgccgcctgcttgtaaatcgcatactgcttgactgcaatgctttccggatttcgcatctccaaacgttcaaacaggatatccagcggagactggtattcctcatcgtcctcttttacctgggcagaacctaacatttccatgatcatggagaagttctgttcctccggcggcgcttcatgtaacagatacagcatgagcgcctgcagcaaggcggtctcacttttctcccaaaacggatctgaactctgcgcccccttcggggtggtgtttcggatcaggttgttgatgagctttagcacatccttgtcatcccgcacataagcaaagggattataacaaaaggacgtttccgggttgatcagatcaaacacccgcacttcatacccttcccgttccagcagccctccggttttccgcagaagttccccttttggatcggtgatcaccatggaacagttgcactgcataatgttgactacggcgtatgcccggctttttcccgcgccggagccacccacgaccaatacatttaaattgcgtttgtgtttataacaatccagccccatacggaagttctgggttaagatcagattttgggtgtaccgcttatcccggtaacgcttgcagatggaagcagcatcgccccacttggcagaaccatgctccacccctcttcgataatttctcttctgggaataataaataccgatgcctaacacataggcgattgtgaatgtgaacacacaccgtagcgtgtacggtgtataggtgatagaaaatggctgatccagtttttcggtcagcacttgtaagatttgtaacagattggtatccggctcgatggcacaggcagtgatcgtgcctgcccaccagacagcaggcagaaacaacagccatacccaaaggtcagaacgtttgcatgctacctctgctggcttcgctccttcttctcttttttgtcttttggcacttcgtttgctggtccgtctaccctatgaaaagaatccacaccgggaacgatggcaaggctccgcccattctcccaatgcatgtgaatctgtccggcatcatcgataaatgctaccgttccctgtaatcccggcggcatccctgcctcatccataaagtccaggcagagccttgttcctttcggataccgctttcgtaattgttccacttgtttttgattatacatcctcatagacatccctcccttctgctaccagaagaagcgcctgctggtatttggtttcatgacttttaagatcacactgtcaatgccatcgctgtatctgcccatggccagatacttgtcccgcagccggttgagggcattgcgaagttcccgttgttcctctatggtgatgggaagccttttctcggaaagttcataggaacggactttctgcagcattgcctctgtcgcagggcgaacctttcccatctgaccctgggctgctaactcatctttgagtgccaccgtaaacatgtttttcatgatgttgtctgttttcaaatagtaatctgccatcttcggcacctcctttgttacacccaacataccacaagaacctcacaatagctatccccaaggacggaactttttctagaacttaccgctccggctgtttctcttttttctccttcttcggtacctgctttggcggttcctcaaaggaaaaatcatccttcgtaaaagtctgctcctgttccccgaagttccgttccatatggttgcggatggtataggctgcctgacgcacatcatttaaaaagccacgcagttcctggggatctttctgcccattcgcctgcatctctgctacttttccaaactggaaaccggacacctctgctccataccgcttgccaatcacataggcgacgcagtatgcctgggcattgactttctttctcacataattcccatcatgctggtctaatgctgcacacgccagttcccggtttactgcatggaatgtcgtattctcatccatgccattgcgcacatagacagtacgctgtttggggatatactgtgcctggatgccttccggcagattgtctgcaatctgcatccgcactggctgatcctttaaaactgcatggatcagttcttccatggaacgctgcggacgttcttccagaggcttcccactcatctggctgatgtcaaagcccttactgatggtatagcctgtcctccgctctccgtctttttcatattcggtgctgaccatataggtgtaaccatgcaccccggcttttggggaacggtgttcttttttccagtaatcataggattttaccaccgttgcctgcggattctgtccgtagatcaacaaaaggttgggtgttttctgggtgttgcactgtgccataaaatccagaaatccttttaaggattccccattttggaacactgcctgcgcctgagcgtcaacctctgcccacacttcttccctctgctgttttttcatggctgcatactcttcttttgacagccgctgttctggagcctgttcttcccctgctccacctaggatcatattcgttaaatccatatcgccttacctgcctttcacttttttcttttttcgctgctggtttctcggttttctccggctcttctgtgtctgcctgcgctgtctctgctcggtttcaatcttctttagttgctgccggacagatggtttctcccatttccggctagtttcctgcccggaaaaagaagcgctgttgtgcgaggaaggtccggacagattccctgccttctccgcctgggtaaaattttcccctgtaggagtaacttcccccacatcaaacagatgatcttcttcgtctaattcaaattcaatggttccttccggcagtaccaccttttcggtcttgaccggaagtccctcttttccttcggttttctcggtaaactctgcatcgatcacacgctctgcttcccgcactggcgcttgctccaccaccgcttctccggcttcggatttgacaaagtccagattcatcttatccaacacccggttcaccttcgctgcatcatcggcaaacaccatgatctctgcagacttgggattctttttatcccggatgactacatacaacagccccctggatttggcttccccggcaaactcccgcagcctgtcatgaggaatagtgaaaaacttcattgcccgctgttcctttaacatccgaagcaggttggtctttccccgggtctttttctgatccttcatcaccgctacaattagcaccgccagattttttgcgatgctcccgctgatccgcaacgtgtgttccacaccttccatggaataccggacaatctgatccgccgcatcaccgccataattcatacgctttcacctccttaccgattccgttctgtctctcttcgctgtttcccggacatttcctgttcctgtgcctttgcctgccttaaccgctcttccatttccaaggactgtttttcaatttgctgacttaagcggatcttctttcgaagttcttttaatttcccattgattgcctgaatgcgcataccgtccggtgctttccggtataattccctgcgctctttcatcaaagaaagtacctgttcttctaagggcttccggtatgctgtcagtccttccctggtcgtgatcccttccttttgtaaaaattctatttggcagatccttttctccagcctctggatatcggaacgtactgcatagggaatccgcttgggcttctttggaaatacccccatctggtataaataagaataatacagtctctgaagtccggtgagtttccgtctcggagattgcatctgcgtgtttccatacacctgccggatctttgggctcagaatcttctcccggatttctacttctccatatccttttcccaaggaacgcaggcggatataccgctccatccccggtgtctttaaggaggggtacctccggttcagcttccacgtatagccccgcttctccatttctttgacaaactgactccaggaaaaactcacaccaatggcttcccggatatccatgcggatgacagtcctccaagtaggcttcccttccgcttctgctttccactgggcataatgcatggcttttccctgattcgtctggatcaccgagagaccatattttctgcataattggtcggaaatctgacgtacctcggtaaaataacttttggcattgctgtggtatttctttccgtccaccatgctcactgaattccataccagatggttgtggtaatgactggtattcagatgggtcgtgatcaccacctcatactgtcctttcaataactgctctgccagttcctgtccgataagatgtgccagttccggggatacctccccttccgcaaagctctgtaccagatggtatccctgtaccccatctttcttatggaatcgttctttggtctttaccatgtctgcataagcattctcacaggtacaccccatggcatcttcaaaaatggtctgttccgtcttttcccggttcaacgcataatcaatggcttcttccagggagccggcactcttggtggtctttgtccggtctttcacatagtcaatggaacggtccaggcggtggacggggagaacgctggtatatgccatctaccattcctctttcaccagacgccaggtctctttggaaatccggagcatttcctgtacgctggcttcccctgccattcctgtgccattggcgacatgggcaagctggttggcattattgcaaagccccgcaatctttcgaagaagttctgcgtgatgttcgcagggcttcgtctgaagctgtgcgcctaagatcagggaacgtaaaaactcctccctgtttaccccactctttgctacctgtccatctagatgccgaagttcctttgcattcaaccgcaccggaaccacatggtttcgttttctcatccgaccacctaccttttcttcttttctgctgtttctaagggatacacctgaattcccctgcgttccatctgccagaggaattccccgatttcccagatctgcccattcacatccacctgcttttcgtctacaaaacggcagatcccaatctcttttgttccgtcctctgccatcatgcaaagactttccccatccaaaagggagaacctctctatcccttccatatcccggaaatggatctgttttggttctccctgtttctgtctgcgtatccgtatctgctccatccgctgatcctcctgctttccggcgactacacagcacatgatcccaatgccaaaggctgcgcctgccactatcccaagggccattcctgcaaaaaacatgtttcttctctcctttctcgactgccgggggattggggttctccccaaagtgcgtttggatatccaaacgctatgcttgcaaaaccagttccatcgattccaatcgactcttccttataaaatcgattacgattcattttctttgatcttgatcaaaccatccagtgtggtgcagatgatatgcagtcggtcagcagtgctgatatctgtattcatcgttccggtcacttcttttccacagaccaccaccatccggcaccgttttaagatcaagtgggacatccggttatatgcctgctgatcctccgcttccccttcatccaaaaatggcagaaacccaaacctcggacaaatcggtacataccccagttcataaatcttccggcagtatctctgcacttttaccctgctttcttctgccggacagcacacatacgccatcgcctgttccatcgcctcactcctttcctgcatccatgtggatgcacctttcttcttctgaaataaatttggacatccatgtggatgcccttgctatttctcgccttcttctttttcctttgcttccagtgcaaacttcacccggtcacttcccagcttataataagcatccgttacctcgatgcccactgcctcatatccttcctctacggctgcaaggatggttgtcccagctccggcaaaggggtctaagatccttccacctggctcgcaaatctggatcacatctttcataagctgcaaaggcttctctgtcacatggatacggttctggggatttccatagcggaacacaccgggaagacaggacaccggacggctgataggcatcggtccgttactgccccacacaatatattcagcctgctggcggaaacgtcccttctgcggacgagagtttcctttatcccacaccgctgtacctctccagatccaacctgcccactgaagggcatcggtaatggacgggtattgtctccagtcaataaaaagacagataggagctccgatcttgcaggctttccgcacatcgtaaagccactctgccatccagtgtgtccaggaacgctgatccttgttatccccatcaaaatccggcaaggcattttcagccttcatactgctgtatttctgattggtagtacggtttctttcattctgcttcgttcccccggacgcatacggcggatcggtgatcactgcatcaaaaattcccggctgaaatgccttcaccagtttcagcgtatctccatgcaggattgtccacttctcccctccggtatattcctctgggtatgttccttctttcaataagttccctaactgcagggtattctccataggcatcatcctttcttatcagcgctttggctgtttcttatcttttttatcggtttctgctattttttcttcccatatcttttatgatatggcaaaagcgaacttcatcggcattcttccttcccacgtttctttggcggcttggtggctttctgaaaatcttcactcaattccgtctctacatattcactgatgatataaagagcctgataatagttctctgatttttggacacgtgcaatcatttcttttgcctcttgtctctgcccatttgcctgaagcagtttatttgcccttgccagaatagaaaacacatttccatcctgtcccacaagctgcatcttcggacgtctcatttccgtttccttctgttgataatcgggatcactgatctgaatttcatagtcaccgctctgccaaaaatgaacatagatttctccatctccgacttggatttcctgctgttcaaacccttctccccatccgtcactatactgcccggtaacatattcatacagttcttctgtttccggctgttctaaaaatgtagtcaattccaaagtagtacatccatacaaaacaccctctttttgtttcactgaagggattgcactgatcactttctctttgatggctgcactgccatcaaaataatccattaaattgcagggctttccttcctcatttccaatggcattatatttttcgattgcttctttgatctccgattcatactgtgacaagtctgttccttccaatggcagtccctcataaacatcgtactcgtattccccctcttcccactgcctttccaattctctggacgtgaaattccctgtcagtggtgtcaacaattctatttttatggtatcttccattcgcttcacctcccacgttctcttcgatgtttctgctgtttttcccacgcctgctttgccaggtcgccataatcagcaccctctattgggggcagattgcagaaaacagcatattctttttcataacgctcttttagctgttcacacgcccatcgtccggcaaaatcatgatcggtgcagatctctatctccgtcacctccggatgctgtttcaaaaaatgttccaatgcatctggtattttcatctttctgacgttctgcccggttccttccttcggtgcagtgacaccgcccaaagacaatcggtatttatccgcattcccttccagtgtcatatgagccagggcatcaatacaggcttcatatactgccacccggcagcttttcccaaggggcggaacacaaaagctgtattgtttttcactgccttcctgttccatccggaaactctttccccgattgtcatagattccccgcaggaacgcataccttgcatgtccctgttcatccatgccaacaaaaacagcgttatgatagggggcactctcatacaggattccgagctgcacacagtaatccagtacctcatcccggattcccctttggttcaaatatctccgcacccggtaaaaattatcattgggcaggggcagggcaaagggcttctttttaggcgctggttctgctctgggaacatacacaggcgtctgctcacacaagatctttacggcttccgtatatcccatgccatctacctgcatcaaaaaccggagggcagacattccaccgatatccctggatttccaatgccatttactggtgatctcattgatcttaaaactgtcatggtcctgaagctgccattcgtttcttgtccttgtctttttcagccttcccggttggtatgtctgcaaatactcatatgcccgcacctgcttggctgcctgatactcttcttccgtaacccaagccatcagatcaccgtattacggagctgttctaccttatcggtgcgctcccatggcagttcctttcttccaaaatgtccaaaggctgctgtctgtcggaaaataggacgggtaaggcgcagcgtatctacgatctgctttggtgtcagtccaaacaccaaagggatcgccatttccagacagtcatccgcacacacttttcctgtgccaaacgtatctacctgaaccataacaggctgggcaacacctatggcgtaggcaagggaaacctgacatctgctggcaagtccggctgcgaccatattttttgcaatataccttgccatatatgccccagaacggtccacttttgaacaatcctttccggaaaatgccccaccgccatggggaaccatgctgccataactgtctaccatcaactttctcccagtcagtcccgtatctgcctccatgcctccgcagacaaaacgtccggatggattgataagtatctttgtatcttcatccggtggaagaaaacgaagtgccggaagaagcaccttttttcggatctctgcttccagtttcttcagattcttatcttccatatgctgacaggatacaaccacactatccagacggacaggcttcccatcctcatactctaccgtcacctgtgctttcccatccgggcagatcccttcaatatagctgcttcttctacaggcagacagttcccggacaatcctatttgcaagcaccacaggcataggcataagctgcggcgtctcatcacaggcatatccgatcatgacgccctgatccccggcaccttgaaaccaatccatttgattgtcagacaccccttcccttttttctttggattccctgaccgcattggtaatgtccggactctgctgatggacaaacgtattcatggcaactccttcgctggaatatcccacctcagacaatacttttttgattacaccaaacacatccggttcataggcgctggtgatctctcctgccacaatgacagttcccttcgtggcaagcacctcacaagccaccttagaattcgcatcatttttcagacacacatccaggattgcatctgcgatctggtcgcacactttgtctggatgcccttcagttactgcttctgctgtataaaattttctcatataaatttcctctctttcatgcaaaaaaagcaggataccttcctttttacgggaacatatcctgcctgatgttttgtctctatttttctgttatcacaaatttttccaaagaaaaactccccagataaaactggggagcctccagaagctataccttgcggtcctacggcttcgtttaaacatttataaagcacccactgtatcttgattgctcaagtgtgggacttaatcatagtatctctgttcctctttattatatgcaactgccttctctttgtcaacaaatttttagcagtcacatttttacaggttgtatgctcttttgaattttccttttacaagattaaaatcttccggtgttaaagtcccaatacatcctcggttcgcatccagccttgacttactaactgcacgtatctcttcacattgaatcatactgtctttatccaaaaattcataagtatgcatagacgctggtatcgttcttcccggaatgacttgtttttcttcatcttctgtatcagaatataacaaaaaccatgaatcctgaattggtagacatcgtgcatttacctttccttttgcatcggtaatacataccactaccactttttcggaattattgattttattattagacatcaccaataccggacgcattttattcttttccgttcctacgttatagcctaaatcacaaaaccatatttgtccatgtaaaacctgtctgtgcttattcgtattaaattttgatatccgattgtaatttactttatcctttgtccaactggcaatattataatattcctgtgcttcttgattcattcgtatcacctactcatatttgataagattcattataattcgcctcatgtgtatcttcaactattttttagactttccaacgagtttccatgccacaaaaagtcctctctcatctatcccttaataacgaaaagacccccgtaggagtctccccggactacgggcttcgcaagtttccgtagtgcgatcactaggcatagtgtaatcgcttctgacacacttgtcaagaacaaatgcttctgtatttcacatatcggctttggctatcatacagattaatgtttcacttctgacagaaattcttcctctgtgataccaacaatccgagaacacaattccacagatactccatactctttataaaatcccaatgcagttgctctttttgcaaagtctgttgcttgttctattgtttgctttgtatcgtacaatacttctttgggtatctcgatgacaacctgcatgctcttccccctttcacctttatctgacttcatatctctgtcgaaattctgtaaaagcctccgatgcttcccgcactcttcctctttccatatccttatatcctgcttccagcttctgatgaatctcttccacagtcatgagatcggcattaatagcaccgttcattttctgcattccatcgaaacccatacactctgttttttctttctgattcatggaacacctccctgtctttctgaaatgattgtaacgctttttcagacaaatgaacagagcttttctatttttaaatacttcttgaaaatatatttcagataactggacgctacatccagatagctgcaaaagttcccatctttgaacacattccgacactacacctgtccacgttccgttgcacatcccgcaaccttgaacacttttaggttatcgttctgtcttttgcttgcagttgcgtctcacattccgcacttttcgggtactttcaaacactccccggaatatacggttcgggaaagccaccaaagagctggaaaagcacctgcctttgaacacttcccaatattacaagatgccacgacctgttgcacatcccttaacttcgaacacttttcgttccgcatcgccacttcccgttgcaccttgtctcacattctgcacttttcgggtacttttgaacacttccggcaggagagtgatccagagtaccccatgatacatccagagagctgaagaaagtacccatctttgaacacttttcacctttcaggttctgcttttactgccacaaggatgttccgggcctccttccactcataagaacaggttaccagcgtcagggttgtctcacaacctgcaccagctacccctgtttcaaacagcgacagcgctttcgcctgcgctacataagcctccaattccttcggaatgtgaaaagatgcctgctggaagtcgaacatggacacatcagctttcaatactgccgctatctggtactcttccatgccttccggcgtctgaaagaacaccctgggatgtgctttccagtaatcataggcggcgtaccggtccagattcccgaacatcgccccgctgttcatgttgtgaccgtaaatggtcagattctttgattctcccaaaatacagtctgcctggaggaacaaactcccattgatgtcgtagtttccccggtaatccctccgcagataatactccggctcttcccggctgctctgcatgaccggataatcgatcccaacctctgggatcgtaagccagccacgaacacccggataccggcgctggagggattgaaggtcaacggcagacacttccggttctcttccagcctgttcctctttctctcctggagagcccccgcccggagggatgtcctccgggaagcaggtttttaactcttccaccagttctcggttctgccggggaatcgccacataatcatgataaattagtgccgcactgaggatacagacagcacacaagactgcctgcagcatccacagcttattcttcttttttcgcttcatctgcttttttatgtctcttcttatagagcatggttgccatgagtccggctgctgatacacctaaaaatgcaaacagaaggattggtttccagtggtcatctcctgtctgcggtacacccggagtttccggtgtccttgcatccttcatttccaccttctggacttccatggtatcttccagtgtaaacttcacatcttctgcgatctcatagccttccggcgctgtgatctcacgcaggatcaattcttcccctaccggaagtttctctaccagatgcggtttgccatctgttacccactcttccaaaacttcaccatccttatttaagatctgaagcttggctccttccagttcctttccggtggtgaggtctgttttggagatttccactttggaataggtatccttcatttccaccttggtcacactgccatcttcctttacttcaaactcaatatcttccgcagacacatacccttctgcataaggcggcagttcttcatggagcgtatatgttccctctggcagtccatagactacgtgcggttcttttgtgctgatccactcctctacaatgttgccatcctggtcgatgctctgaagcttcaccccttccagttcttccccggttgtggcatcggtttttgtaaactggcttttcgttggctgattttccacttcttttgtcagcttgatttctgcaaggttctggtctgtgtaagaggcatcgatctcccagatttcctcatttggaagataccccggctttctcacttcctctttcacataatattttccatgatagaggtcgctgtcaaaggtaagctgtcccttctcatccgttgctttcttctccagcatcgtgtccttttctacaagaacctcaccctgctgggagaggatatcttcttttgcatacaatccaaagatcacgccttccagcttctcttctgtgactgcatccttcttttctacagaaatggaaatcttctgtcgctcatttttataagcaaccccttcataaaccactgcctgagtatcatcctctgcggtcagggtaaattctttctgttccgggttcaatacgaaatggtcgcctgctatggtttctttcagataataagagcccaatggaagattgttcaccactgcttttccttccttatctgtgaccaaagttgccaccagatcgtctttttcataacggatgaccggattgccctgctcatcctttgctccgtccggggaataaatggtgtccttggcatacagttcaaaggttgccccttccacaccggattcttcatagacaaaatcatggaacactccggtatcggtatcctctccggtcactgcatctttgatctttcctgccagtctctttgcctttacaagcagggaatcccccttcacttccactggctgttctccggttttggtcagtgtcaggctgcccacctgctcatcgtttggctgctcgacttccacgatgactgccccggtatccggatcgatctgatgggcggtattggaagaaaccgtgatcacaattccctcttttgggttctctttgtaactgccttttccggtcacttccaatggagaaattattgtttccccttcatacaaggaactctcatatccctgtcttacaaacccttccggtgcttttacttcttcaatccggtaagtagaacatttcaattcttccggtgttaccagatagccttcctcattggtcttaaaaacgctgatggtctctttcttcggatagaataccgtctgctctacatattcctctttttccatgtcaaagattttataggaagcgcctgcttttaaaaccggattgcctgtctgtgcatcctttttcacgatctttaacaaaaactcaaatggacggtcatcgaagatcctccataccatcggttctctgctgtcctcatcaaccttcaccaaaaacggatcgatggctttcaagttctccggtacagtgctttcctctaccacataaagaccatacggaagctccggactgagggcatatccttttttatctgtaataagctccggtaccgggacagccttgccatccacataggtcactgccacctcttccttactgaaatcataacctcggaaatcttccgcagtaagctgctcgccattggatggctgtagttccccactctttactttggacaggttgctgactaaatacactttaaatcctgccccttccacaaggtctgtttctgtctggtctccatcttcgctgatcttgatcagctggaacgcctgctttttcacctgttcctgtaccgtcaggtccctggttacctctgccacttcctgtccttcgtaagcaaggtccacctcatactctattggatctaccgtatagccttccggcggagtgatctctttcacatacatttttcccagatacaattcggaaaaatctaaggtaccatcctccttgatcacgccctgtgcgatgaggctgtcttttttgaacagaaccctcgtctttccatccgggtggacgatatcctctctggcatacagaccatacacagccccggcaagggaactatccccctggggaagaaaggcctgtgtctccttatcgaacttttggatatggacagcgcctcgtaccctctcatcagttgctgagatggtgaccgtctttccggcttccacatccaccttatggatcacatcactctgtgcatacttgtccggagccttgatctctttcacatatactgttttgatggctacctcaaaataatcactgactgcttttccctcttccccagtgactggcatttccatcaaaagatgctcacacttgctgtctgtataaatgccatacactgcaccgtctaaaggattcttggtatccgcatcctgtttgaaaagctcgatccttgtcatctccagccagtctaccgtaaaacttactggattggctttctccgattcaaagactccaatgtcctgattgctgtttcctgtggataatatcagtgttctccaggtttcccctacagaaccatgcagctccccggaggaatattttccggtatgaagcattggggcagtcaaataaaaggtatccccgccatagatcttcagcgcaccattctctgcggaagttccctttgtcttgttataaatggtgatgtcttttggtacatggactgaaatgtagtttcggtgatccccggacaatgtgatatccggtgttttctgtacatttccatttcggactgcttttacagaagtcttggaaagagaaatttctcccttcggcggctcttccatagcaaacaggtggtcaatataggcgatcacgcctgcgtttaccaggtcttcatacttacatcctgtaaatcctgcctcacctgcataggcatagctggctgcgatgtgggtatatacatatttctcttctgcacttttcccggacagataactacctgtaatatccccggcaccgccataaccataatacagcaccttctgcaagttcttattgctgtccagtacctgtgccacatagtcaccactcggcggtgagaaacgatgggattccagacagtaagcgatctttccattgaccgtaaaccagcaggttaagtaatttccaatataacttggatagtagatggtctctcctttttccagatgtacggtttcccttgctcggaaagtattttccgcaccggaaagcatcatcacttccccatcctcaatcttttcttccagttcccttgctgcctgtgcatccgcatcttccccggataccgtcacttccacatccgggatttcctgcacaggcgtctccgaatcttcttcagaattcgtatcctccttctgtttctgaccgccattttcttctgtatgagcctgcccttccgtatccgtcaggatgatctttctgctcacagaatagctgtcacgcgcatcctttggcacaacccagtaggttgcgatataagttccttcctggtcaggatggtagctccctccatcttccgcttcaatacgctctaacgtaacatcctctttttccggattgtaatggatgccttccatacaagtctctaccataaaatccttgtcggaaatatctttcgtgatatcttctgctgttaccaaatgtttcgcagcttctgaaacttcctctgtctgttccgtttcagatatttctgcgctctccgtcactggctctgacggattttttgtttctgccgcatggacatccgctaagttccccagcggactatgccccataagcagtgcgagcccaaaagctgcaagtcttgttttgatatttctgctcttcattgcattctccttttttcgttaaaaataccgcagaggctttcccctgcggctttgttatctactgacttctgttttcttgtgactggctttttgctttcccacttcctgtctggtacgctttagcgcatcggtcacagatcggctggaaatcccattctgatggcagccttccacgatccccataaaataaagatccgaggggatggcaggctgatccttatagggtgcattcatggtatatgccatgacttcccgtttcacaccatcctttccctgaacaaaaacaggctccttcccatacaggtggggatacccttcataaaagtccaggcttttttcacactccggtgtgatcttccaaagcaccccttccacctggctgccctcttccggcaaaatagtggcaacaccgcatccttttcccctgccacaaaagatcaggcggtatccctccagcttgacattctccactacggaagctgccggacagcggtacgccatctggtctaagttcatgttgctgccataggcaaaataataggtttctttcatctcttacctcctaacgggcatcctctgcccgatgatttcgattcaaacattcataggtactgcggtcatatctccatgctctgtcaccctccagattggcaagcagatgttcccggacattcttatattccggtccaatgagtcccagccgcaataaaaaagtacggaaggtaaatgccggattctctgtaatctccgttttccgcatctgggtacatttctgattgatggcctgggcagagatggcaagagccaaagtgatatttgcccgcacttttcctgcatggagggtactctcaaaacatctccactccaaagttcctttggaaaatactgcatgaaggttcaacgcatagtaccgggtgctgtcataatgactattgcttccgtccctgccctcataccatacccgtttcaacttttccatggaaatggtgttgtttggcatccggcggatcttctccagcacaatagggcgtaccttctggcaatactcctgttctcttgatgtctgtaccttcaatgccttgaacaggatatcctctttggaatacataatggtcatagcatttttgaggcttcttggtgtgtgattggaagcgtccacatgcacatgctgcccgcaggatgcatttaccttcgccccatgatgcctgagacaccgcaccacttcctgcagctttcccatttctccataggacaatttcggactgaccatttcggtgctgtattcacttccagcacgaaccatgcgtccacgctccctgcgttccgtataaatgcttccatcatacatgaacttccatttctttccttcctgatctgtcacagaccagaccccataatatccaccgtcgcaaactgcccttgttccaaacagttctgctactttctccgcagccctctgcctggtgatccctgtcatctcaatctctgtaccgaaatattgatcctgaattccaattgccatactgccttacctctttgtcttttcatcctctgcccggatttctgcatctgcctgccgaagaagcgttccgatggcttcgatcacgttgacggtcactccatttccggcctgtttatacagctggctgtccgaagtctcctgttctatgcggtcaatctgccaatcataaaaaccctgcagccgcagacactcccttggcaccagcctccggattctgccccgataggcaactccatgccggtctgtggcagtaatagtgaacatcggctcttccggctccttcatcctccggccattctgccgggtttcttctcttcccggagtcagaactgccctggcaccttcctcttttaagacaccagagcattcccctttatgattatggatgccggactgtctggtattcagacacctgcactgctctgtgacaagaggtggcacagacagatccacaaaatgaagcgttccctgctggattcctgtagtaagggtatgggcgatctgatgccccacacgccctcttctggtattcatgcctgcatatcctaagtcaatgctgtctcccggatacgccatcttatatccctgcttggtattctccttgatgggaatacccatctcatacaatccagtttttccacccataccgcctgccagcgatgtcaaagtacagcttaatccttccgggctgtacactcttttcccctggctgcctgttcggatttgtataagagacgttccatttgctgctgggaaaggtaatatttttccggcacatcttcgatcaagatatccgacaagatacacccgttttctggattgggggactccaaaatccttgctgttaagcactttccattccacaccgtaccccagctcagataaggtactgaggatggtgtgaaacgtcctgcctttgtcatgcgaaagcagtccgggaacattttcaaggatgaaatacgcaggtcgcttgtctgcaaccagtctggcaatctcgaagaacagagttcctctggcatctgcaaatccttcccgctttccggcgatagagaatgcctggcaaggaaatcctgcacacaaaagatcaaagtccggcattcgttcagtttcgattgttcttgcgtcattgcaaaaccactccccttctgtgtcgaacagcaatcggtagttcttatccgcataagcatccacctcgcagtgtcccacacaggtaaaaccgcctgcacgtcttaacccttcccggaatcccccgattccgctgaataaatcaaaaaatcgaatggttgcggctatcaacctcctttgctgaaaaaaagcaggcggcatggtttttctcccacaccgcctgctggttttatagttctatgtgtttggcattatgcgatctcttcggtttcttccagattatctatttcttccggctgttccagttcctgccatttggcttctacctcttccaccgctttttcgatgatgcggatgataaaatctttctgtttgatgccttcctttgtgactgcccatttgactctctggaataattcctctgtgacctgtactgctaatgttcttttttccatgctttcttctcctttgccttccagcctgttaaagtgttcttcgatcacctgccggataaagatctgtgtacttgtttccttttcttcgatctcggctcgtaccttctcatgtaattccaccgggatctttccgcatatgttcttcatctctgccataagcgctttcccctttcgttttgttatacacaacatactcccaaatttgaaagaaagctattcacaatacccactaaagaaaccatgtcaaatgtatgcaaaaccaaagcatatccaacaatgccatgctttccttgcccataggcctcaccccctttactcctgctccatctgaaataaaaaatccagcatctgaccgggaatttcttccttttcctgtgctggcgtcctttccacatcgccacattttaactcttcccgaacagcctcctgaatgagtctttttaatgtttctctctcttcttgttccagaatcacatccaccagatactgattcctctgccctgccggaatttccatcaaaagctgccacgctttttcatgttccgggttcttaaggtttgggcggaaggaaaagaccgggcggctcacagcgtcctcatctgccccacaatccgttcatatccggcagcgttggcatggatatccgtcaggtaaatcgggcggcacaggcggtcctgctcgcttacacgatgtttaaaaatagcagcaccgcctcccatgaaaacggaagggactgcccgcaggtcaaagcctgcctcggtgatcgcagacaggattttttcaatataaagcctgccctgcctctcaatcaaagacaccacttccgcaggcatgctgctgggttttccatgtaagacacgctcgatctgcgtctccgttaccgacagccctgtatttctccttacctgttccctgatctcatccatacagcggatgacccccagttccaggcttctacaggtagctgcgttaggaacagcattatcaagccgcatcaagtccaccgtccaacctccgatatccacaagaagcacagaaggctcatcttttaaatactctggataaagagccagggctgaatatccctgggggaacagtttcacatcctcaatctggatctcatagcgttccccttcgtagaaaaaacggattggctgttccttccgaaacagatactccttgaatttctgtttttcccttccaaacccggtaaggggaagtccggctgcaagaacaaccttcgctgtcctttccccctttcgctttcggatctcctgtgccagtgctgccagcgtcaacagataataattgtcgttggcggtcttgtcctttaccaatgtctgtctcccagtcccacacacataatattctcccctgtactggaggacattctgcatggtatagggttcatactcataccggatgatccctgtggggaaacacacctgctttgttttaatggcgtaatatccatgatcgattccgataatcattgcttaccactcccttcttttctattctatgttaagtttccggtgaaagagcccttgcccccgaaggcgcgccccggcagacattcttttctttccagcctgttttttccctacttctagtcttgaaaaaatgtttggactggaagataatgcagtgttccttccaaaacaagcgcctgtctttgaaaacgaaagattccttggttctgtaactccaccatttcgtaatatgctttctttgttaaaaagtaacgatgatatattcccgcgtctccaaactgctccgtctgctccaacaccaaaaactccaccatatacctggtatccggtgcaaaccgtttttcacatagcatggcatctccctggactgccttcacaccctccgcctctctggctactgccaataattcatggatactgatactcacgtttgctatcacctcccttcgaagcctttttcttcgtatttctatacttaattttctgcgaaaaaaagacaggcacctacacgatgtctgtctctgtgggatcttccaatccccttttatatgatttttatataatttatctttttattttgctattttcaattccataaattctctttttgctcgattcacgctatcgaactttttatcccacttttttcgtacttctgattgttttaatacctgtttcaatgtatagtcatcaaaatatgtaatcttcttagaagtataatattttttacaataactttcatatgtagaaattagcctcgcttcacattcatctggttcataatcaggatcatattgtttaagaacatcctccaaatcttctgataaataaaataaatctggtggatactgcgtagcaaccacttctccctcatattcaatcgggaatggtttagtattaattccttctttttctaatttatattcaaagtatgaaaataaactattcgcatttatttgtatatcattatagacactaatctctttatatgcttctaaaagcgaattcaatttttttaattcttttttcttgaaatatcttacactatattctcttgcgatttcttctatcttcttgtaattatttcttgaatagctgtcatttaatatactaataatcggatgaatgaccgacattttcagattatttctattccctttacggtaataagctgccgaaattatcaaagaaattataccagataataaaaccgtaaataaagtaaatatatttgcattccaattctctaaaaaccactttataaactcttccatatttcttacctcatgtattttcaattctttctcaatagataatataccataaatccctttccttttccatttaataccattaccgcattatctaatcaaataatctcttttcttttatttctaaatttaagcatcctaaaaatacatctttaatcataaagacaggcacctacacgatgtctgtctctgtgggatctaccatctctttttcctgatattgttgttttataatttgttccagctgtttccgaacttcctcatccaatatctgtgtgcaaaattcctgtatccatcgttcatgcaaatgctcatctgcttctgtagactccaaggacacgatgctgcaggtttcatcatataataattccaactggcgaaattgttcgccaaactgccctgcaaattcattccagatttctaggttatataatttcaagccttaaaaatcagtcacatatgtcagcctgtccaaatctgaaaatgtcattttttctattcccatcaggattgccctgtcacgctttccacataaaaacaggaaagcaaaccgttctatatcgctctgatacataatcattcccctttgcataaataattccttattacgaaacattataaaaagtgaactcagtaaaatcaatataaagtttctttattacgaaacatcaaggaatgagaggactctatcatgcagaagatcagaccagacatggatatcggcaaaaatatccaagccatccgttatcaaaacaaacttacgcaagaccaggtcattgcaaagttaaacctgatgggtatctccagggctgtgaagtctgcctttcgcttacagcatcgcaaaaccatcttatcttggcggttacggataacggaacgggtctgtctgctgaaaagctgcaagagctggaagaaaaaccgcattatatggaaagcacagatgaacggcttgatttaagacatgggcttggattgctgattgtccaacaagtcgccatagctcataacggcaatttcaaacttactaatgttttcccgaaagggtgtgaagctactttaatattcccgtggttaacgggtgaaccgaacagaggtggggaacggcagcggcagacaattggagtatctccgaaataatggcaccaagaacagccattattgtactgaattacacggaacgataatgccgatgcaatgttatacgtgcccgggaggagcaatgcttttttaactgatgtagatcatgcgagctttgaaaaagcaaacaggacacggtaaattaacctccaatcggctaccgtgtccctgcaagtcgtcataggtttgtgtaaacgcaaagaaagggcggctctgaaaatcaaagccgccgttccaaatgggcgtgtcacattgtatgctttacgacggctttttttcttttaccgtcgtccggcagaatgttattcgatgttcatttctatatttccggtgaaatcttcacattcaatccctatatagtttccaccatcgggaagcgtaattgtatcgctataagttccggttgtttcaatcaaagtgactgcttcatcagctccagaaatccaaaatacttttgcagttccctccgtaacctccagcgcgcagtcaatagacagatccttaccagcttcacgctttatggaagttccgccgaacaaatactctgtatctgaaaaatcctcatagttggctgtatagcttccagtataatcatcaattcctttttctttcgtaccttgtaaggatgaatttccagtaagcgctatggaaccagcagactgaacaatattgttatactgatcgagaacttcatcttttgtgcaacctgaaagcacagaagcacccaatagcatcaggcataatgataagactattttcttcacagctatcaccttcctttcctgcgtatagcacgcttttcttttcccttggcatttgtctgtttacgggattttatttcttttttgttactggacatcagtaacaacagcacagtccaaagaaccatgataccaaccccaataaccgccaacaaaagatttgatgatgtggttgttccagcatattcactcatgtcaaatcctactaaaatcagcgcagcagagaaaggatagatgctggcaaagataccacctttgaaaaacaacatgctgtatccaaggaagaacgccagaatggaaccgcccagatatgcccctcggatctgcccaaaaatcagaatcagcggcatacagaccaaataggtcgtcagagctgctaacacgatctgcgtacctccatgaaaaaacacttccgctgtcaatcccgataatccaaccgtcaaaccagtaatcaaggtaatgccaacgctgtatattcccagcagaactgcaagcataccgactaaaagtaacttagctcccaacattttcggtatagaaacaggaattgtcatgatgtttttcagtgtatcatgagtggattctctgtctataagccatcctccgatcattaccagtgaaattggaaggaatatctgagtgtttccccaaacaacattttcaaatagtgcagaaaaatcatagtttggatttcggtactccgcctccataatcaactggcttccatattgcaccaaaggacaaagtgcaagcgctaccaaccctaccaaaaggatttggcaccggcgcagtttcaataattccgattttaataagttccacatagtcacacccccttagatttcctgacgccggtaaacaaatgcaatcagcgcaagaaatacaatggcttctacaataatcacaccaaatacctgaacactattcagaaaatacggactgacccgttccaacaaatctgccaactccgcactggtctggctttggtcataaaattgaaatgtccagcggaaggccagcggtcccgggaacagggttcctatgttcaaaccaaaaggctgtgtaagaaacatatcgttcatggaaaggatataattcgcaatcgtatagaaaaaggtaatcacaacagacacgatatagtttttattaagaagaataacgagcagaatgcagggaagtgcgccaacccacataatcaacccttcttcaatcccaacgccaaacaaggtcaaaaaaccaaccggctcccaaccctgaaacaacaaaaccgcaaggtttaccaatcctccaactgccataaagccaacggcaaacaacagtaaaaccagcattttggacagcattagcttggttctatttaccggtatggtaacaaggtttttcagtgtgtcattatcgagttcctcaaacaacagattcgaagccagtatcacaagaagtggcatcaaaaacaaatatgcactaagttggaataggctggacatcactccatttacagcatccacatcagtgtttacatctgccagaaagaaagcataagccaatggcatgaaaacagaaatcagtagggaaataaatatcaatggcttccgtttcaatttcaaaaattcgcatttgattagtttaagcaattccctcgcctccagtcacccgcttgaagtaatcttcaaggctttcttcacaggtatgggcttctgatacctccaatccgttttctacaaaagcggttacaattttttcgacaggtaaatcaagattatgtaagcgtaaattatggtcgtcctgtatagaaaaattgttttcatggaaagtacgttccaaaagtcttgccgcctgtgcggtatcggaaacggtaaagcgaatatgcttgctgctttttgcttccagttccgcaaggctttcttcttccagtaatgctccgcggttgataattccaatatcatcagccaatagagaaatttctgaaaggatatgacttgaaattaaaattgttttccctcgcgcgtcacaaagctcacgaataaaggaacgtacttctgcgataccgatagggtcaagtccattgataggctcgtctaaaattaaaagttccgggtcgtgcatgactgcaagggcaatcgccaaccgctgcttcataccaagagagtattgcgaaaacagctttttatccttgtaaggaagcccgaccaaatccagagcgtccttgattgcatggctgttcggcactccccgcagagtagcaaaaatacgcagattttccgttgcggtcaaattcggataaaagccgggggactcaattagactgccaatgcgggggagcaacttcttttcattcccttgcaaagactttccccagattttgacctccccggaagtcggcttcgttaagcccaacagtattttcatggtagtggtttttccggctccgtttctgcccagcagaccgtaaattttcccacgcttcacatggatatttaagtcagccacactcttttgtgagccgtattgcttcgtcagattttttgtttcaatgatataatttgtatccatattcaaaacctcctgttctgtaaggtattctatcatgccaaccttgcattaaccttgtcgcaaccttgcattaaccttgcaattaaggaatgaattgcaatgcaaatcctattccgctacttctcaatccgtttggggattgagaaggttcccatgccattttctaaaagacttctgaaaataagtaaggctcccgccataaagacgggaacccgcttaaatttccaaaggaaaaagcaaagtaaattccgttccttttcccggtacactttcaactgttatgctcccacccatcttttctacaagctgatggacaatagaaagaccaagaccgctgcctttgtcagaccgtcctttgtcacacttatagagccgttcaaaaatgtgtttcaaatcttccttctcaattcccactccattatccgcaagcagcagctccatgttattttccttctttgacagggcaattttgattttgtctgcatggctgtgagcgattacattttgaatgagattattgatgatcctcatatagctgtccatatccaatcttacccggataggctgttcgggaatatcaatgtcataatcgacctgcttatcttcaaaaatcggtatccagtcgattaggatatttcttgtcagctctgcagcttcaacgatctggatctccaaagcaaactcgttagaatttaacttgaaccagtcaaagagtacatcaatatattctttcagatcatgggctttccggcgggcggtttcaatataatcatcccggtcttttcctgtgaccagtcctttgtgtgcagcgtcaagatacccaatcagagtagtaaggggcgttcgcacatcatgggaaaggctcgtcataagctggcggttggtttcttccgtctgccgtacagttgaaagtctgctttcataggccacaacgatctcgttgatttcataagcaagaggtgctgtcagttcatttgttgcagatagaatacgccggttgccatttccgtttttcacatcaaccagcacatcggtcatttctgctatttgtttttttacacgccgaacgagaacgatggaagtcaatacagccacaacaacaatcacaacggataagaatacgatgatttccatgctggctacacctccttattaaaccgatatccaatccctttgaccgtttgtatatactttgggcttgaagaattgacttctaattttttacgaagccgactgataatcgccataatgttactgtcatcatagaaatattcttcgccccatacttcctcataaatctgctgttttgtcaaaattttcccttgatgttttgcacagtacaggagtaaatcaaattcctttgggggcagttcaaaagtgccgtttgatgtagtaacagaacgattttcaaggtcaatctgcagtccgttaaaatttagcttttgtatggctccggcttgctgattaaagcgagtgtagcggcgtataagagacgcaatacgggcaatcagttcgtccatatcaaacggttttgtcagataatcgtccgccccggctcgtaagccccgtactttagaaatgctgtcatttttagatgtaaacatcaaaatcggtaagctgtactccttgcgaatttcttccagcgtttcaaaaccatccattccgggcatcatcacatccagcactacaagctggtattcctgctcttttaatttttgtaaaccctcttttccggtattacaaaaatcagcttctatgttttctgcttgtacgctacgtttaatcaattcacacagtgctttgtcatcatctataatcaaaatcctattcatgatgcaactccttcctttgggatataatcatttctacatcctccacactaacattagtgccttttatggtagcatctggatccatagtagctctggcatccagaccaaccattgccgccactagcattccaccttttaatataaactggtttttatactctgataaagaaattcgttctaaaaaacgttccatcatataattccgcttcaaaatctgtgcatctgcggattttttctttgacatattacgaattaaatcctttaattgtcttgccgttgttatcatctaaagtaacacctccaaatatggtctaagtatgttttcaacatgaaacatagctgcgtatttcataagcatccgcaagtttttatccttacattttgcatattgctttaatgcatcttggaagacctgcatttcaatatttttcctgctgcgaagcagatcgcaaatcgttctctccatatcataaaccggaactgaatgtccaaatgatgtcagcatagttgtgatccctatttcatgtaaatccttttttactgtatacacttgaaaaccgtcttcctgcaaacggcttggattatatccagttcttactgttatggtgtatttcaaaggctctctgtccgttaaatcatgaaaaaacaatgcagtttcgtgagaaaatacagcttgaccacaacgcaaatgcaaaagaaacatcgcatctgtccacgtatcaggtgatacatacacaccatgagaagcttgctctaatcctcgttccttcacataggcataaaacacagacttgctaattccattatttaggacttgaaatgtctgaattgtccctccacattcacgcaataacaaatctaatttttcaaattgagtcatatattctctcctttcatgctaatatgataataggcgtttgcgaaacgccataaaccgcataaatacggcactttttgttcctgaaaaccaaataactcctcactggatatggtataatagagtcgtccaaaaactataaaccgccatccaagaaaggagttattctgatacctatgataccatataaacagctttctctggcagatattttttcagattgccaagaaaaatttgaaaacgacaaacctgcatttctttccctattagaaactcatatcgacatcgatgaaattattccgatttcttttagaaatcatttttatgcatcaacgggcagaacccgtaaataccccttgcaagctttcctgtgggctttgatcatccaacgtattttctcaattcctacagaccagcttctcctgacttttctcgcttactcaaaacctcttcgtgaattctgcggttttaccaaagtcccggatgcttccaaaatcacgcgtttcaaacaggactttttagatgatctgcagctcgtattcgatcaacttgttgatattaccgagcccatctgtcaggccattgattccgcaaaagcagatatgaccatcttcgattcttccggaattgaagcatttgttaccgaaaataatcctaaatatgtcaatcggatcattcggcagcttaaggcatatgcgaaagcacagcgctttgataaatcctacgatccttataaggctgcctacgcttccatgccttcccatgcttctgccaatcctgaaatcaagcagctgtatatcaatggacatttttgctatgtcttcaagttcggcattgttaccaatggtctcggcatcattcgtcatatctctttttataacaaagattttatgacctctcatcctgacatcgttgtggaaaagaaatccgattcccctgacgaagataaatgtgtccacgattcaaaactcttgattccaacactcaaggacttcttttccagacatcctctgatcaatccgaaaacattccttggcgatgcagcttttgataccgcagaactctataagaatcttcttactggtaacacttttggtgataacaaacatttctccaaagcctatatccctctgaatgcaagatccggacttgaaaatcaggattataccattaataaagacggaatcccctgctgtccccatgatccattgctcctaatgaagccagagggcagtaaatcaaacttacgcagcggaatacctacttttaagttcgtttgtcctaaaatgaaatgggtttacgataaagcaacccagaaatcacatcgccaatgtttttgtgaaactccttgtacttcatctaaatgtggacgaatggtctacatctatccggaaaaggatcttcgcgcttatcccggaacaatccggggaaccgaagaatgggacaacacctacaaaatccgaacagttgttgaaagagacatcaatcacatcaaggataatctttgtcttgcaggacgccgaactcaaaacgagaagactttacatgctgatctgatcctttccggaatcacgcagcttattactgttgttcttgcacataagattaagcatcatgaatacattcgcagcttaaaacctctcattgcataggacttaccaactccataaagcctatggcttattaaagtgcgcctaaaatgtgtaagaattctcttttcattccacaatccgtgaaaagcaagcattctttcctgatttgcttcgagatcgctaaggaacttagcgagtttcgcaattacctataatatgataatacacattagcatgaaagtaaatataagtaatagcagttaaaattataaatgttcttactactattggaacggtttttattgttatttttttaagtttacttgcgattgcaaatatgtaatcatcttaagggagaaaagcggttagtctatacgattgactgcttttttcatacccagaaaggagtgattgatttatgcgtatgaaaaaaggacttatgataaattatcaaatctaagtccttttcaatccatttgaaatatagaaaatatcatttcaaatcattatcattttttacatattccagaatatctccgggttggcaatctaatgcttctgatgcggacgaagctctatttccggattcattcctgggaaagttaaatgactgccatccatattcacgggggcggatgctgttaaatcgttcattgtacacttttaccagcctctctcgtctctgctggtctttaaaaatccagtctttaaatgctactttcattgcatcctgcttctgtgatgccagcatggtttctttcttattaaggacacggttctcatcaccattttcattcacactctattttatatccttggaacccatagaagccgcccatccagcctgaatcctttgtattacgcttccatcccgtgcatcgatcgtaaggagtggaacacctgcatcatccatcgtcacgtctcctatgaccggtccatcctccccatttccgtactcatactctggctctttggatgtccaggttccataaaaatcccacaccgggatcaggactgcttcggtatcgctgccttcactgtctggcatgcacatataacccagctgtacctttgttatggttatctccgcactctgtgcatcaatggacggataacggtagtggcttcctccatcgacagagatcagccgattcttgtcttctgtcatgacctgcaaagtgatcgttttttcaaagatatccttgacctcatcaaaaggaagtaagaacagcctttcatcggaagcattcgatgcttctatgggatttcggtgcagaaaactctgaagtgtcccactgcaaaagtccatcgtcagtacttcattttcccatccttcagactgtccttcatgaagggttccatcttcgttttcccattcaagagcctgttcattaacaggcagagaggtttccctcacataattaaccggaaccccgtctatcatccgttcaaaaatgaaatcatctttttccagggtagtgcttccttcagtaagtgcttttgaggaactttcaaatatctcccagtctccggacacaagacctgaaaccttctcctttgcttccttttcagacactttcccgcttcctgcctttatataattttgaaagcgttcttccctttcttttttctcgctcgattccagggtcatgtctccacaatcgtcaaagataaacttcgctatcccaaatccgagttcctccacatccgatacctgttcactctgtgtataagaataccgataggtcagtccatctactgtatatgtccccgcctgttcgttctcattcttctcttcctgcatgggctgtccttttccgaatgtgtcttttattttattctgttcttcttcaggaatcgccaatctttttactttttttaaacagattgcatctacatccggcacttttaccggtgcatccgctgtcagtgtaaaattcatcggggtttctttatcctcccggtccgctgatcttagatctgcctggatcgttgtctggtatatttccggtgcctgtacctgttcggcaacggttttctgaactgtctcctttttctcttcttttttctgttctgtctgatccttttcttccacaacagcagactggacaatacggtcacatccggataatgtcaaaagattcatacacagaacggctcccataaacatttttattttcttcatcctttttccatcctttcctttcggtattaaaaaaggtacccttttcttatgagaaaagagtaccatattgctttgccgatgtattcatcaagatgtaaacaacttgtaaatcagaagatggctcttaccgtggtcccctctctctgtctgctttcgattttcaagcatccgccatggatttcagccaccttcacacagagtgccagcccaagtccggatccgccttcttttcggcttcgtgatttgtccaccatataaaatgcatctgtaatctttcccagttcttcctccgggatccccattccagtatccgacacctcaaagatcttttttccagctttctcataagcccttacccaaatgcttccaccggcatccgtagcctttagggcattgtcgatcaggtttatcagaaggctttccatcaaggccggatccattttcatggaaaaggcttcacattccatcttgaggtgcacctctttcttttctgcctgttctttttccaggtctatgacatggtttaaaaggtcacctgccatggtcatttccatctgtatggcatggttctgataaagccccagcatctgcagcatcttcccagaaagagcctccaggcgttttccctcccggttgatatgttccagtgcccggtctttctgttcatctttcagctttacatggcgcagggtatccgaatacccgataatggacgttaacggggtacgcatttcatgggaaagtgcccccatgagcagctcctgtttctctgccacttcctgtagcttctccatctgttccacagttcttcgcatcatcatataaataaaaaggccggcgatcaggaacacagccagataaattccaaaaaaccagacagcggtctgtctcagctctgcaaaaagccctgtgacttcccggacagagaggacttcatatccttccggtctggataatggttccagctggagaaggaggtatttctgtcccagtttctgtatcttgtaggcatacggatctccttcatcctttaagcctaagttttcgagccccaccactttataatttgtcaggttttcaatgacggcattgctttttcggtcgatgagagccatgccttccccacagcatcgctggaactgaaagcccatataagcctgctttccagtctcggacatctgctcatatttgctgttatcccaaaattgttccaggagtatcttgccattttccagctgtcttccgtaggtctctgcagcattattgaggcttcgttttcctgtgatataaagacttagcgttcccactgggatcagggcacataatagcgttaccagcataagaagtaccgttcgtttccacagcttcatccttattcctccagacggtatccaagtttcgggatcgtcctgatctcatcataaagttccagcttttttctgagctgtccgatatggacatccaccgtcctgctttctcccaggtagttttctccccagacccgttttaacagttcttcccttccaagcgcaatgttcttattttgcaggagcagcacaaagaggtcatattccattggctttaggcttaccggaagcccgtctttgtagacctgatggctttgcatgtccaccaggatgttccggaccgttaagactttcttggcccgtcccgtcctctccagcaccttctcaatgcgtaccagaagttccagcatctcaaaaggctttaccatataatcttccgcacccagctttaatcccttcaccttggaagccacatcatcctttgcagtcaggtagagcaccggaagcttcttctttttaaaatcctccatcaatgcaaacccgtcttttcccggcagcatgatatccactactgccaggtccgcgtcctcctgccataagagcagcctctgggcttcttccccatcatacgctgccacagtctcataccctgctgcctccaggttcatgcacagcaattctgaaattgcacggtcatcttctatcaccaaaattttatttttcattcccgctgccacctctaacgcttttctatagtatagttttttaaatcccaggtctacattgcatttgttcttgttttctcatcatttatacgcatcagggcacgataatgtgaccagttcaattcagggcacagtgtgtctcgaattagaaaagtacaataaaactgaaattatagatttttgtctcttatcttttttgccattacgaatccaaacagtgacatgctcccaccacttaaatctctgattttgaagtgggggcttcttgctcaatggctctactgagccaagtatctacaagctatcctcgcgtgccccgcgatttttattagtccggttacggactttttattgtgctgtcatgcacattctgcaaagattctttttccctcattcatgatgttaactgctgcatttacatcacggtccattctgtgtccgcattcacagtaatagatcctttcagataaagacaatttttcttttttctttccacatgcactgcaaatcctacttgatgcaaaataacgatctacttttatcagatacttcccgcgttcctccagtttatattccagcatagacagaaacaggccatatccattatcatgtacgccttttccaagatgaagtcctcctgccatccctttcagattcagatcttccacgcatactgcatcgtagctctcggcaagactggcactgagtttatgttgaaagtcttttctctgatttcggatcttttcatggcacagtgcaactcttttcttctgtttcttataattctgactgcctttctgacatctggacagctttctctgttcccgcgcaagctttttctctgtatttcgatagaacatcggatattcagctcttttaccggtagaaaacacacacattccctgcatcgcaaaatcgatcccaataaatttttctgccggtcttttttctgctgtttggttttcacagcaaaacaaaagactggcaaaatattttccggatggctccctgctgactgtcacagatttcagtttccatttttctgataccggacggtgaagctttattctgacagccgtcatcttaggcagtttcagatatttcccttccagaaagatatttccattcaccacgtttgttgtataggatttccttgatgacttctttgatttgaaacgcggaaatcctgcagatggttcacgaaaaaacttatggaatgcactttccagatgcatctgtacatttgctaacgccaatgaatccacctctttcagccagggatattctttcttgtaactggctggtgtgttccttaacatctttttttcttttttataatgttccattttgtcagcaagcatacaattatagatgaagcgactgcaaccgattgttttatctatttgcacacgttgttctgcatttggatagattcttatttttactgcccgatttatttttctcaccttattcctacatatgaatgatttcaatcatcgttttttgaacaatatgttctctttttattattataatacaattccaacacgcgaacaagtgttttctttttttgtttataaaattcttttgagcatttatgctcagatctacaattcatctcccacctatagaggaaggagaattcttgttatattttgttaaataactatcgttatcaattctattccaatcgaataatactccttgtaagaattgatcattcatctaatcacctgcctgtaaaaaacactttctaatctaccttttctttctctttggacaagaagcaaaaagaacagaattgattattccaactatccactgactgtttatgagtccaaataatcttgtttgtatgtaccctctgaataatacttctaatgttctctttgctacagtaaaaaaataaaaagaagccagcagtcaaaatcaaagggatccatatctgtgataaattcagcacaataacatttatatttgttgtataaagccagccctgacagaaagcactgcacatgattaagcagtaaactgcaagagctttcatcccatcccttttatcattttttctcaaattactttcgtactatatatttaaccaactcattcgatcactcccacatgccagctaattctattatgctttcatcatctctataaacttttatttatcttctaactcaaatccgagttctttcaattctttttcgtttctgacatcttcttccgttttctttccagtaatggcactgtaggcttctttgattccatttttcactgcccatttgatgacgaaatacagcgcaatcaaaataataattgcggttcccccgcttaaacctaattcattccacataatcattaactcctccgatttcgtaactttcaatttattttcaattttgcaggctgggatttatcattgaataaaacacatccatactccaactgctataatcaatatgcctgatattcttcctgcgaattttgacttttgatatcctagaaaattaattgtttcaggagttgtaaatggcaataaaacaacatctatacccattactacaatcccaattcctattataaagacattattgttagaaataatgccataaaacataactaagaatcccaaaataatgcctaatgtaaaatacttgattttatggctgtctttatccatcatcttttcataataattttcacatttactgttacaaaattcaaaattatcattgagttttttgccacaatatttgcattttttcacactctattcctccataatttccgttttgttactaacatgatatcatatttttttctcaattacatccacctaattttatacactaccattcgttttgcttctgtaaccagcatcctcttgatcttctcctgcaaggtttcctttgcatcttcatcaatcgaataaatctcatttatctcgatttttttcggttcccggtcaaaatggtcaaagacttctttccatatctggacggaacatacacacttttcttccatgaaattattgctgataattataaaaaaaacagaagaccatttaagatcttccattttataaacaaacctctatataaaactatatatcctgcccatttttaataaaaacagacaatcggcacactttcgtctatcctattataaagttctgccgctttgtccgccggaagattaatgcatccatgggatccaccaccttctcggaaacgatttcctccaaagtatggctgccatgaagcatcatgaaatccaatccccccattaaaaggcatccagtaagttactggtctttcatattcatatttcccattttccagcatctttcctttcagcacagatggacttttcttgtaatacagttgaaaaattcccggtggtgtctgccgttttgcatactgcatatctcctgacacaatatccgattccaaaatgatagaaccatcctgatagtaatataaatgctgtgcagacaggtccacttcaatatacgtgctgcctatatcattcattccccgtgcatttgcccgcatagcgtataccggttcccggcttatctgtactcctgcataatggtttctatttctttttcctgatcgatcttccatccataaacggaactatacacctgaacagtacgtccgcttgttgtacaaaattccctctctgtatttacggtatcatgtgtggcagccagctgtgccacatattctgccacacactgtctcagttcatcctcatttttttgcagccgtcctctctcatcaaaaataagccattttctgatctcgtctccctccaatgttaccgtttcttctccaaatatatatacgattttggtccgaatcagattttggcattcttccaatgaatttttaagatctggatcatctttcagtactgccgcttttacataaacagccggacagctattcaggtcaatcgttctttttttgctagcaaccgcttctgacagtgcctgataagctccattgaaatccagggtattcccttctgtttccggtacgatttcaaacttcgaatctttataagctacatatgcatcttctggtgctgtctgattctctttttttacacattccagtttttccagctgttcttttaacttcactttatcataggtcatgttttccttggctgtataattttgttttttccaaaatccccgaacccatttatatagtttttgttcatccagatattgggaaatactgccatccgaaacataacgatatccgatcaattttccattgatactctgtgatttcagatttcttgcctttacttccagcagataatcctctgcttttttagcaaccgcctgttctgcctcttccgatgtttttccagaacagttaattccattgatcgttgttccccgaaaaaatctgtctgaatagtaataagacattcctgcatagccagccatagcaaagaacactatgatgacagtgattattgtccacattttttgctttccattatccttaccggttatctcttttctttttcccatccatgccccctgtttttaacgataaacagcattcagacaaattttttaaatcgtctgattttaatatctccgatttaataaaaaataaccaaggctgctggaaaaaacattttcttttacaaacagtaagctgatttctacaaaacattttacgctgctcttttctgcgaggatccgtatcagccgtctccggttctttgggtctaatgctgttgatggttcgtccatcagcattacctttgggttcattgcaaggatggtggctatggcagctattctcttttcgccacctgacatcttataattctggcggtctttcaaatgtataaggtccagttcttccaaggcctccctggcaagctgatctgcttcttttctgctcttaccataatttaatggtccaaatatcatatcttcataaaccgtcggcataaacatctgattatcagaatcctgaaacacatacctcaggcattgccggattctacttgaattttcctgatttacttctgtttcatcaacagtgatctttccctttgcagggatcagtcccagcattgccttcattagcgtagacttccctgcaccattggctccgatcagccccacctgttctcctttactgatatggaaagacacataattcaaggcatttttctcttctccatatccaaatactacattttcaaattttattattttcgtctacactttctatacaaacattcttcccagcagcactgtgactgagcatgttctcatcaaaataaatactgatacccagaaaatcacatatccccaggatgcaagtttgttatatgctttctctgcataataaaattccccatggaatccccgcaattccatactttcgtataatgcaactgcccgatccatgcttcttaagagtagctgccctaaaaaaatgggaggtttcacttacctcccatttcccaaagaatccttttatttcagtttttataatgtttcaagaaaacgcatgaatgcttctcttccctcggtcgtacatttgtatactcctgcatcttccagaacatgggtaaatacgattccaatctctttctgaagaatgccatggatgttttcttttgtgatttccggatatttcggaagaaacttcttaacccactctgcatgtttctcaatctgttcatttgaagaaatatctttgccttcgagaatatactcttccaaaagttccatctcaccttttaatctggccggaagaactgcaagtcccataacttcgatcagaccgatattttctttcttaatatgatgatattctgcatgcggatggtacactcccagcggatgttcttctgttgtgatgttgttccttaatgtcagatccagttcgtaggtatcacctactttacgtgcaattggtgtaattgtattatgtggttctccattggtctcagcataaataaatgctttttcatcggtatagcctctccatacttccagcacatgtgttgccagatctaccaaacggttgaaatctttatgtcgaatacgaagcacagataatggccattttacaattccagcctctacatcttcaaatcccggaagtaccacgtgctgctcaattggtgcttttgccattgcaaatgtataatgtccaccctggaaatgatcatggcttaggatcgaaccacctacgatcggcaggtctgcattagatccaaggaaataatgcggaaacagttttacaaaatcaaacagtttaatgaatgcatttctctcgattttcattggagtatgctggcagttaaacacaatgcaatgctcattgtaatacacatacggagaatactggaatccccaaggagtatcattgattgtgatcggaataattctgtggttctgccttgccggatgattaacacgtcccgcatatccttcattttccgggcaaagaagacatttcggataacttccggattttacattccttgccgcggcaattgcttttggatctttttccggtttggacaaattgatggtaatatcaatctcaccgtatggactgtctaccttccacttttgatccttctctacacgatacctgcggatataattgctgtcctgactcagcttataaaaataatcagtagctttcttcgggctttctgcatatttgtcccagaattctttttgtacctgacccggacgtggcatcagacagttcatcaatctggtatcaaataaatcccggtatacaatactgtcctcaatcagacctctttttacggcttcatccagcaattcgtccaatgtttcttcaagattaacaggttcctcaatgttgtccggtttttcataatcatcttcatgaaaaacatccagcagaagatttgttgtgtagtttctttcacattccggtgtcagacctgttgtaatcccatactgtaccagttttgcaatgctttcacttaacatttttcttcctcctgtgcttcacttttaaatttatatttttggtaacatatataccgatttccctgataagtcagcatacctcgatcgcctttttccaattcacgaaaatctccctgttgcatttgaaattccatcaaacttccatctgtcatctcaaatacaacgcgaaaccaaggtacatgtgcttcagactgcatatgggtatagattccttgcttcttttcaactacagtcgcatcaacagattcaactgccgcactactattattgctgaaacttaacaacatttgggtaaatacaaacatcatgattatgagtgctgctacacagattataaatgccatcctatttctccattccagatatttcatcctgggtctgacttatatgttgttcacgataaaaattccggtattcccttgacgttactttatatctttcacgagatacccggttaaatgtcctttggctctcaactcctgcatccaggcaaatgtctgtgatgctcttaccagtacattccaattaatctcctgcaagttttgtctactttttcttcccatttggcaagtaatagacgtcttctgatattataatgtgcttgtaagataaagaaaggaggaaaacgaaatgaaaagatttaaagcatacgtcaactacctcatgaacttctatgccaactacttcagaatttaccgctatatgtaaaggacattcctgccatcacaggaatgtcctttacggaaacccagtttcaatggtttcccttattatactctaatttagttgcatttgtacatgaacaggattctcgaaaacatagacaaaattgaacagaattatgaaaatactcttaccacgttttttgatttttaaaccacttattagcagacggatccgccaatgctgaaaacggataggcagttttcctttcagctttcaatttgtccaattaataatctctgaatttccatacatctgatggatttgcatttttcatcctcagcattctttgaagctgctcttctgtaaaccacaaatcgtgcagtatttttccgaaatatagaggctagatatcagaccgcttcattgcaattataaactgttgatttaccaagattatttacatatacggtaatcaagtcgcctttcttaagatccggcttttcccataccaaacggcttttatgataatacactttatcatgatatgtaaaactatatagaatcctgtatggaatctgtcttctatatcttgtgtatttttgcaaatatactttttctaccaagcccttcacttttgtaccattttcgattaattgtaaatgtaatttatcaagctttgcagtataaattccaagagcagcacttattatacacaaaagcacccccgttatagaaaacacagttcccaacatatctggattctgaatacctgagtttactgctggttttaatatcccaagaaaacttaagataccggaaacaagaaagaatgttcctatccaaaagaagataactctcaataaatcttctgtataattaagttttttcatatttattttctccacaagcattccatcaaaattttttatcctgtttcaatcatatctaattttacttcaatttagttaaatcctctaaatacatttctgtatgtccacactctggacagactgcaactttaacatcatctatagttgtcgttttttgtttttcatctacatctacaacgatcccatagccaccgccattaactttaagtcttaaatccgctctcatgactgttccacacttttcgcattttctcattgctgtcctccaaatatatatttcgctttcctatttttcttactacataatagcagacaaaatattaaccactgaatgatctaccgttcatacgatgcaatgatttccttgctatccgctattttataatcaagtgtttccaaattaccaatcaaatcaaatgtcatatccgcattaacttgcaattcatcttcaatcttaactgcagacggctcaacttttagaaatactgttaatccataaggcttcgtttcagactgtatctgtatgctatcataagaatatccttccggatactcttgcccacttacaatatttataacattcgaagaatctcctacataatctgtcttgtactgtgacaggtcaggaatctcgtacagttcttcttttctgccacatgcagaaagcaatattgctgataccgtaaataaaataattggaattacttttttcatcatgaaccagctcctcttcacactttgatataaaacagcctgcccaatgaaccagaaactgccatatatctgcttctttatttatagatcagcctttaaacaaacgaagcataaatcataaaaatttctgcgatcaatataattcctaaaacacaatcaatcatcaggttatattgaccaactgttagccaagtcttcgaatgcatcagaacatactttatactttttataccactcaagattgtaacagccagaaggagtatcggcattaaaaaaatttctatcttattgccaaagtcatctgcgactccattcccagcaaagtgaacgggaataatctccggtaagaaaaagaagcttattatcgcaatcgcaattccaacgatgcaaattccccatgttaatttcctgctgcttataccatccataacagtgcctcatctggaacgatatctagtaaatatgtttccttagaagaaattttttcaagaagtttttccagtaaattttcttccttaccttctgctattagcagaagttccttatacaaaaccgtaggaattccaatagaatacatttcttcctcatatacgagagagccaaatgtccggccttcctcgccctctggatatttttctattatctctttttatcctttcccgttacggtcattacaattcaaagaattgaaaatctcaatattcgtaagagacaataatctttctgcaaaaatcacaattataggcagctatgcggtctccagatatccttgctgccaactctggatccgtatttaaccgcaaactctcagagccttctttccactccagtcctgcccctgcgccaaccgcatgcaactgaccctttcgcatttttccttcacaatatggacatctcatattcacgtcatctcctttaagtaattaaagttcctcttgttcccgagaattatcctgttcctggatagcttgtatatcttctttcgaatataatttttgcctaaatgttcttttctattttttctcgtttcatacgttctttcatcaataaaacaaattgaacggtccatattacacacgctgcaaaacatccgattccactgtataataaatctatggctgcaccggctacaaatggcagtgccatccacatcatccgatttccatatactctgcacatttctttttcatcatactgttttcgttcttccgtagatttcatattatagccagacaaaaatgcagcggcctttccatttgattttacaaaactgattccaaataaaaacataatcactgccattcccaaatcaaagataacacagattatcattgtagacacctcacttcccactctggctatcaaataaaaaaagccaaacacaacagtaaaacttattatgtttggctaggtcaacttgttatttttttatcacttcttatggttgtattatactatatatttttctatagtaaaacaattttttatattattttttattttaatattatatttctactatcatcaatttttcagatattttaaacgcataaacaatgctattaactacaatatttccagaaaattcatcataggtttgtgttgccacaaagaaacgctggctctgaaaatcaaagccgtcgttccaaattgtctgctttttcttttgccgtcgtgcggcagataatcaattcgttctattttgaacttcttttatgctacctgatgtctgcaataggaatgaatcgccaagaatgtaaacacaaataattcaattcctgccgaaagcaaaataatatgcggtgtccagaaactcatcccaccgatattcagataattgaaatttgcaagctgacaaaggaaattgttctgcataccaattccggcagatggaagtatggtagagagccatgttgctcccatcgccacataagcaaaaaacggcatgagaagaactacaatagagatcagcaaaactgtcaatgtgtctttacattttgcagacaggaacaacgtacagctaaccgttgctaatacagaaagtaagcccgctgctgcgagaatgatctgcaactgccccagattgatgtttggcaggttaatgatagagtatcgcatctgaaacgatgtttttaagcaatccgtcccgaacgctgcatctaaaatcagaatgtgtaccgtgatcccgacaaggaaagtaacaacgaaaagtgtaaatgctgccagaattttggtaattgctaattgtttacgcccgtatttggtggttcgcaggatgcagtcaccgcccgtttgatattctccggcaaaagtaggagctgcgattgccacacacaaaatagcaaggaacaaaatataaaactcaatataatcaaatgcatctttagaaattccagaatgaagataaaatggcgtatcaagttctgaatatttttcaagagctttctgttgtgcggtttcgttttctctttgctcattccgcatgacatcctgtaaatgttctgcgcacttttcataataggctccgtcaatgtcattcgggtcaatatccattaaatcagcaccaatgcctgttaatggatcagcaaacgcttcgggcagacccatcagcaagtgacggaacgggacgattttttcaataaatacagccagaggaaagccctcttcctcgactggcccatattctcgaacgcagctttgataagtttccaaagccgatttgatcctatccggggtcacttcaccagcggatgttttatataaatcttgtttgtacttgatcgctgccaagccgtctaattctgtaaccgtgccatcttcgtttggacggttaataccctcaaatgaaataggcaggtatgccatggctacggaaagcaaaagtgcgattgcaagtataatcagggtgcgccgtgacttcaaaatacgttttatttcaagtctaaagagtcgcatattatctctcctccttttccaagtctgtctgcggaaacaaccacagatacagatcttccaatcgtggttccgttgtaacagatccatcaatttccgagtgttcggacagataacgaatagaaacctgattgtgatcttcgcctcgctgattgataatgtgcagccgcatttcacattccggcagctttgaggccggaattgtgcaattccaaaccttgccctcaatctgcttgacaagttctgcggtagttccgacatcaacaatttctccggctttcataattgcgttgcgcgtagaaatatattctatgtcagatacgatatgggtggaaatcaacacgattcgatcatgcgaaaactcggaaatgaaattccgcagacgcacgcgctctccgggatcgagtcctgctgtcggttcgtccatgacaagtatctccgggtcgttcaacatagcctgcgcaataccaacacgacgcttcatgccacctgacagattggagatttttttctttttcacatcggagagcgaaagaatgtccaacaaatgattgatctttttggtagttgcccttgtgggaatatctttcagcgcagctatatactccaaataatctttgaccgtaaaatcccggtgatacccaaaatcctgcggcagaaagccaaacttgcttcggtagacttcacctaactctcgaatgttttttccgtcatagtaaactgctccgctggttggtgtcataatatcagcaatcatgcgcatgagcgtggttttccctgcaccattcgcccccaaaagtccccaaacgccgggagtcaatgtcagattgacatcatttactgctgttttgtctttgaactgcttgcttaaatgctctattttcagttccatgcttacactcctttcttttgcttcggctgaacaataaaaagcctttgttcgataatcattgtaccgaacaaaggcttttcaatctcaaaaatcacacgcttaaattcctaagtaattcctaagatcacagtcttattttcctaagcggaaaggggtaatgtaatcacaaagtctatagtttcgttttgactggatgcagtaatctttccaccatgtaaatgtataatttcttccgcaatagaaagaccaagtcccgcaccacctgtattagaaagccgggcatcatccaagcgattgaatttctcaaatatactgttaagctgttcctccgggattgtttccccacgattttcaaaagtaatctgaatatcatgctctaaccgtttggcggatatagtgatttctgtctgcgggtaactatatgacgcggcatttcgtaaaaggttactgaaaactctcgccagcttttcgggatcagcgttcacagataagttgtcctccgcagtaaataccgccgtgttgccatttgcagagagtgtcgggtatatttcatctattacctgcgcaatcagacaatgcaaatctacattttcttttttgataatgaccgtatgtgcattgtacttggtaatttcaaaaagctcattgataagtctttcaaggcgctctgctttgtctaacgcgatcttgacatacttttccttttgctgctcaggcatatcagaggcttcatggagtaggctcaaataaccgatcactgttgttaaaggtgtgcgtatatcatgtgccagatacatgacaatttcatttttcttttcttcagcctgctttgcagcctgcttgcttaacagaacagacattttgatctgattgagctgttcctccagttctttcagaggatcagacaacgatactgtatgactgttctgctcatagaccgtttgggttgcgtcaattacttcatccagatagtcccacggctttttccaatagtaattgaagatacatacaaagcctatcaccagatacagaataaacagcggaccaagcctccagtagatccatgcaaaaatatcgttgtcaaattttgaaaagatgtagtccaagagaagggtcaaaccatatccaacaacggtataaatcagcaatgatagatataagcgcactttaaggcgcttttctgttgtcatttctttcttcgacatgagaatacacctcctaccgattagcaaacagaattaagccaagcagtccaatcacgacaacacttactatgcttgccagaatggaaaacagtctgtttgcttttattctatttccgattaaccgagccgtcatcgaatatacagcaagccccaaaagaccacctgccgtatttgtgagtacatcagtaatatcagaacgtccgactgctaagatatactgcatagtttccaataaaaaacttgttccagcaatcagcatgaatttcacatataattttgttcctggcagaagcatttgaagataaatacccataggcacaaaaatcaagaaattatcgagcccctctgttaagtgaaatgctgctccgatttccttgtcatagtgaaaaggaataaagtttatacttcttatcttatccagatcactgattgaaaattgtagtttaaaaagtatgatccaaaccaaaagtgccagataaattaagaataaaatggttacaaagcaatttgattttcttttcatagcgtactcctttcgcttaaattttgtaaccaacaccccaaatcgttttaatatactgcggagtatcggaagtatctttcagtttctcacgcagatgccggatatgcacagtaattgtgctgctgtttttagagtagtattcatctttccaaactgcatgaaacagttcctcaatgcttacaacattcccggcactttccaaaagaacctggaggatagaaaattctgtcggtgtcagagaaaccggctcaccgtctaacagacattcatgggtctgcacattcaggcacaatttgttataggaaagttccgatggaactttctctgtgatgatactgggcgaatatttcttgtaacgtcttaactgcgctttcactctggcaattacttcaagtgggcgaaaaggttttgtcacataatcgtccgctcccaatgtcagccccgttattttatccgtttcctcaattttagccgttagcatgatgattggataagtgtatttctttcggataagctggcaaagtgaaaaaccgttcatatccgggagcataatatccagaatggcaagatcaatgtcgccgctttcaatacacgacatggcatccgttgcgcaataaaacttataaacgatgtaattttcgtttttcaagtagacctccaacagatccgctatatcttgctcgtcatctataatcaatatcttttcagacatattttcaactctcctttttgcttgtactcgattaagtataacaaatacagcatctaaattcacaatggattacatgagaaattattaagattttcctaattttttttcatgctaatatgataatgcacattagcatattagcatgaaagtaatcacaaataacacccatgaacaaatttaattataacaatgtccctttgcaaatgcttgttttattgcttttattatggaatactatcgaaagtagacatttttttgtgcaaaaccacgaacttgtccatttataagaaaaagaataaattattagggatatttttgatttctgcacgtctaatagatgtaaagaaaatgctggctggcaaaaaaaaggtggtgtttaaatgacaaaggaacaacttggatctctgatcctagattcagaaagacaattatactcaactgcaaaaacaattttatttagtgactatgactgtgcagatgctattcaagaaacaattgtgaaggctttttccaacgtcggcacattaaaaaacgataactatgcccggacctggttaatccgtatcttaatcaacgaatgttacagccttgtgcgtaaatccagtaaatttatcccattggaaaatctggctgacagacaggaaccggaatcagaaaaaacaaagaattacagtgaattgtatacagccgtaaattccttaaaagaggaactgcgtttacccgttattctatactatatagaagatttcagtgtaaaagaaatcgcccagatccttgaaatatcggaaggtgccgttcaaaagagacttgcaagggcaagaggaaaattaaggcaggaattacaggaggtgtcaatatgagattagaagatatgaaaaacgatattcccgaaacaccggattttatccataatatgattcaaaatgaggtagcaaagcagctggcggataataaagtggcgaatctgcgaagaagaaaacgatggacagctccgaaagttgccgcagtggcagctgcgtgtgcactggcagtttccacggcagtatatgcaggagtaaatctgtatcactggtttttggaaaaacagggttcttatggtgtttcagtcaaaattgatgctggtgatgcagtaaagaagaccgtgcttccagatgaggtcccagaggtagatctgtctgctaaatatgttccggagggcatgagctggattgacgagtaccatctccaatatcctgagcatggcatgactggcgggttcagtttttcatttgtcctgttggataaaaatgatctgggacaggtagtacaggatcagaatgttattgatagtgaagagcgtacatttggaaaataccaggggatatatctcaaatataatagcattaccgaaaacggggctcttaaccagagaatttatcttgtctgcccggatttatatcgtgtgcttatgatctacatcggagatgatgtgtcaaaggatgaagccataaaagttgcagaaaatctggtgattgagggaaacacgactatggtaaagaccgccggattgcctacatggagcggagagatgatatctgaaaagacagaagatgataatgatgaaataagtacttctgtaaatgagaaaaaactacccatttaccaaattggtgacacctttgatctggatgtgattggtgaaaacacaaatggtgaatatctggaaaaaacgatttctgcaaaggtagattctgttcaaatttctgatgatcttcagcttctcgatccggacaaaataccacaagaatgggcggaagccattgatgctgatggaaagctatctacaaacacattgaattatgtgaaatctggcgacggaatcgattccctggatgaaattgtgaagtcagaggaagtgaatcagaaactggtctatgttacagttacctataccaatcattcaaatgaggaaatcgaccatatgctttatcttggtgctttactgaccctgactaaggaaaatggaaaagtacagctttacattccaacagaacaggccggcgatggctatgactacattagctgggacggcgtggcaaagactggaggaatggtatattatagtgtctctgaaaattatggcaatggtggaaactacatttcctctataaaaccaggcgaaagtgtacagctgaacatggcctggatcgtaaatgaaagcgacctcaaaaatctgtatctgaatgtgactggagacggagcttcatatgagttctctgaatatatactgaaaaagggactagtagatattcgcaaataatatgctatcgtttatgatcccatttttttatatgtcatatatgaaaaagcgtttttcgattccttttggtttcgaaaaacgctttctttgcttcttcgatctctgcacatgaagtgtaatctgtggtatccaatacgatttcctcattctttccattgccggttaataattataacgacagtgtactatatgaagcaaccgacaacaacaaaaatcattaaatgagtttcgacagaaaaagagattccacactgtaagtggaacctcttatctattaacgcaatggacaatcagatacttttatattttgagccagtttatgcaacccaagatgtctgcagtagttttccaaatcttttggattctgggatgaacgtggtccgataataattgaattgataatatcttccctgtgcatattttctgtttctaagactttttgtaaatctaaaatgtagaactcttttattatattgaatgttttgtattcgatatgaggatcgttgtccgttacaaaatatggtgcgattcggatttccttttcagcagtaaatgtaggatgtttgtgaataagggcacataatgctaaattatcaatgaatccatctaagttggaaaatccttccagaattccagtggaaatatatgaagacaataatttgtataattcatgatccctggtctcctgagtataatactgttcgccaatgatcatcccatgataatataacaggttgtgcaatgcttcggtattgaattctattgcaacaccacgtccatgatcggcatagcggtcccattgagctgcatcgtctaatgcctgtgacaaacagaacataaaaaggtgtttttgcgatgttctgtcatatatttctttaaatattttatcaacatcacatttgggttttatattgttttgggtaagaccgttctcaatgttctgcttcaggttatcaataaacccaatcacttcttttgcatcattcacattcgttgcgctgccaaaccaaatcttttttttccttaaaattccatccaaggctggaaaagaagtgtaatgccataaagttttaccaactttctgaacaaatttgtcagtagattcctgtcttttctgaatttctactaaattgtaggtcatatacaatacctcttctgaaataatatcatttgaatatgcatcgatcggacaaatcctttattctgtatagatgttcccattctcatccgtccaggtgccgtcaccattgtctgtgtatccgaccccatctgcgtcacaataataataatctccgtttgttgtttctattacattaacagtaccgttactgccctggagttcatgctgttccagttggtttccgaaatgataaccttcgtcattccaggtacgatatgaatttccattggcatctgcccagtttccatctccctgataactgtatcggctcccataataatcagaataggtcccatctccgttatcgtaaagaactctggattcttcatctcctccacccggtgctacaattgatgctacaccggaagtagtactgaatccactggtatatggtacgcctgctggcagattttcataagatgaaacagacccgttgttgtcagaggtaattccatcatcggtcgtttcacttacctgtccgctgttttccatggcaggttcatcgtttgtttccgcatctgctttttcctcttcgtctacagaatcctctgtatctgtattctctgtcactcctccttcgtcctgggtttcagcagctttctgcatagttaccatttcagaaaatggtgcataatccggtacattatttttctctggatctgcatttttttcaataccagacttctccgtctctactgaaactgtatctgtcccggcagagacattaaataccagattaccgcctgcaagcagcagcgtcacaagaattcccggaagaattcctttgcggagtttccgaatgttcaccatatacagaatccgatctttaaacaccatttcgctgtcattaagacttgctgtcacatatggaatctgattttccatggctactgtcctgagaagcagctgtcgatataatttatgttcctttttattaactctgcgaacaactgctgtatcacacagattctcaatatccttatccgcttctttcagcatgataagaagaaagggattgaaccagtatatcgatgcacagattcgaaggagcatcttataccagagatcccgatggcaataatgtgtaagttcatggtaaaagataagttttctttcttctgctgaatacccggttgctggtagatacaattttgtatgtaaaagtcctgcaagaagcggtgtggtaagacctgcgttttgcctgagttccggtattctgcgtacgtgcttcttttgacacgctgcacggtacatctgaatactcaccgtatcacttacctgcagactcatccgttccagattccttatagaaaaataatatgccagcaattctcccgtcagtttaagtaccgctacgctcagccagacagcagcaaaaatcaaagccacaattcccagccatttatctgattcgtacctgacagttctcttttgttccgggatttctgtcagatttttcatgtctttgctcgcagatgatacgttttctgttatcttctgactttcctctggtctgactgcgtaatccgttatcttcgggctttgcgtattctgttgactgcttctaagtactttgaaatccaccagtgccagattcgccggaaggcgcaccggaacacaaaggcttatcgtaatcaacagccagataaggtacttccatctcgctgatacacgtcctttaaacagagtcgcaagcacttttaccagtaaaattactactgctgcaataacattcagtttcagaatgtgtagaatgaaaacctccataattcgctattcctccctgtcctccaggttcttaagaaattcactgagatcctggacttcttccgagctgatcttctttccatgataaagtgaagttacaaacttttttagtgaattcccataaagtttctcaagaacactctggctttcatgtgcctgataatctgactgcgaaaccaggggtgtatacagattcatttttccctgtttcgtcacttccacgaaatttttgttctccaatctggtcagcaatgacaaaattgttgttgatgcaagttttttcttcatagtgatcactttctcaatctccggtctggtcatcggcggagtattattccaaagaacgagcataatatccagctctgattccggaagtctctggtaagtttttttcactttttcatacctcctgttacatattttctacaaatgtaggaataactctattttaccacggttcacggaaatggcaagggcttttgcacaatttgcaaatgcccttgccattcctgcagctactgaccactatcagtctatttctgtataactgctgccattttcatcactccatgtcccgtctccattgtccgtaaatcctgtaccattttcgtcctggaaataataatcaccatttgtagtttccgtaaccgtcacagtattaccgtttgcatcctgaaggtcatgctgttccaacgtatgtcccagatgatgagtatcatcattcagagctgagtaggtatttccattttcgtcggtataagtctcatccccattatcggtatagttcattccatcatctccacgatattcacaagaataatctttgtgaagaatgtaattaatctcaatggtatttccatcactgtcaactaatgtcattggtgaggtagaaaggatatcggaatcatcattgctgtccgaggattttgcagaagcattttcttctgtatcggaggaatctgaatctcctcctgacttctgactggcagtatctgtagttgccttatcagaatcatcagaagaatcatcggtctggttttcattctcctgtctggtaagtgaaggatttccaggatacgaaatatattctacaaattttctgacgtcactgatgtcatctgcatcttttgcatatcccactgccatatacaggctgtttccctctgaataaattgtctgatagcaggcatcgtatgtgtcattgcatttggcaatccctgttttgacatcctccagtgaatatttatagatatttacataatcatttccgttcgtatagcttgcataggtaccttccgtatctgctttttcccattcagatccagccggcggctgtgtatagaaatcgttatttcctgctgccataaccgttgcagctgaaaaaatcccaagtgttgctaccgtcataagtgtcataaattttgtcttcatcgtggattctcctagaattttattttctacatctgtagaagttaattgtattctacaactgtagaatacaattgtcaattcttttttctatatttttttatcatctcagtttaatttctatttttccttccactgggctatataaatccagaggatcttcatcgctttcataaacacgtccttcgccttctccaaatgatttgcggcatactggacatgatagtcagaactaatatttcttttttcatttttctgcaatcgtatttccatcaaaagtgccattttacgccattcttgcaataaaaaaaaggtcctcccggatagactattattgttcctgtccatccagaaagacctgaaaattaaaatgttatattttttagaaattatccattaaatttctgcaaacatttaaataaaatcatgggtttcgttttctacaaactccccatctaagaaagcaagatcatccccggcttcctgtacttccgcttcctcgtcagaatattctatctgcccacctttctcttcctgcctttcacaccatacgaccagacgtttggaggcatctgttccacaggtggaaagcagaagcgtcggaacttcttcctgcgttccaagtaagaaagcttctccatctgccggtgtatactcgcattttacgatcacaaagatccatatcccttcatccggaagatacagatagaggatatggtgttcttttaaaaattcatcgtcaaggaaatttcgaagtccgcgaaacatgctgccatctttcatattgtgtccataaatgatgttcttgtcatcagaaaaatcgacactgttatcggaatccaggaaaatggcccctgccacatgttctgcctttttaaaagtatgtgtcaggtaataggagtcatcgtttccctggactaccgggtaatcaatgctggtatccgggatccggatccatgcaacgatatccggattgatctttttcaatgccctaaaatcaaccacggtctgtttcccatcgcttccgtctgttccttctgtgtggtcatcctcatctgtttccttgacgtatgtacgcaggtcttcatattcctgcacaccttcccggtacataaagtaaatgccaaaaccggtacatacgcaaaagctgagtaccatcaggcagactgccacgatcatgatttcttttatgtgtctcatacaaacctccgattattcttcctggaaaaagggctgccggtaaatcgagcagccctgaaccgtattccttaatttccttttttcttcttataccagatcacgccgccaatgccgcaggcagaaaggactgccagaaggatcggaagccagatgttggtgctgtcccctgttttcgggctgtttcctgtcggtgtgctgccggaaggggatttggtgtttttgatctcttttacgatctcgatcaccttggtttttccgtctttgtattcaaagcggatctcttcttctttgctgcttaattcataaccatttggtgctttggtctctaccaggatatatttcacggttttctctacttttccatttttataagtagcaatcggaatcttgccgcttttcgctgttccggtcttatccgttaccagtttttctacgacttttccgctttccttttcacgcagttcaaattctgctcctgaaagggctgacttactggtggaatcggtctttttgatgaccagttttccatacggatgtgcgtccttcattttgactttctggacttttccagtatcttttaccgtaaatttcacatctttcgcaatgaggtatccatccggggcctgctcttcacgaagggtatattcgcctaccggaagtttttcgaccatatgcggtttatccgtggacgtccagctttcaactttctttccatctttatccaggatgatcagttttgctcccggtacctcactggaatccgtaatgtctttcttgctgatttccactttggtcacatcatcaagcatctggtgtttctgtacttcttttgtgttttcgacggtaaattcaatactttccgcagtcacataaccatctgccggctttgtttctgtcatcttgtatttctttcctacgataaggcccttgatgatatgtgcttcctctttggatacccattcatccaccgtatttccatcctcatctgttacctttaaggatgctcccggaagttcttttttgtccgtcaggtctgctttggaaagttctaccgtagtctgttcatcttcaaaggtgaacgcatactctgcaacactggttccactgccctggtactcaaaagtgaatttctgcggttcctggtctgtcacatagccatccggggcggcaagttccttaatgtagtacctgctatcaaccgggagatctgcaacaaactggatctttccctcctcatctgtggtcttcagttcgatcagggtgtctttcgcaaggagtacttttccttttgaagatacgatgtcgtctgctgcatagaggccaaagattgccccagaaagtactttgtcactgtccttttcttttttcaggacttccacctgtaccctctggcgcgcattctgccagtcggcactataagtaaccagaggtgtatcctggtcacggtatgtaagatccacatatcttggttcattatccagaacgtagccatgtgaggtctctttttccacgatgtaatagcgtccaagcgggaggttatccatctgggcgatgccatttccatctgttgtaatggagccgaccagttcatctgccgcataataatctgcacttaccccgtctgctgcacggatggcttctgccgcgtaaacattgaaggttacatcagtcaggtttccagtcacatagttgaacaggtgctcgatcatgccttttgcattgtcaagaagggatacgctgtctaagaattcccctttcttgtttaccagaagtcttgctaccgggacttcatcttccattttgactttctgtacttctgcagtatcagagatcgtaaactctacgtctgttgcacgtaagtagccatatggtgcaagctcttcacgcagaatgtaagtttttccaacctgaagtcgcttgatcacatgtggggaatcctttacggatgtccaggaatcgatcacgttgccgtccttatccagtacactcatggaagccccgtcaagttctgttccggtcgtgatatctgcttttgttacttctaccgttgtcggctggtttttcttcacggattttaatttgatcgtttttacgtcctggccctggtatgtggcatcaaattccaggatctcatcggaagatacataacccgccggcgcctgcagctctttcacatagtatctgccaagcggaagatctagcgtaaacgctgccttacctttttcgttgcttgtgatttcctgaagcagtgtatctgcttttacgaccaccttgtcgccggaagaaattgcttctttattgtataatccaaaggttgcaccttttaaagcctttccgatctcggcatcctgtttttccacactcagctctactttctggcgttcattggaaaattccagtttttcttcgatctccggtgtgttctgatccttatagataaaggatacttcctgactgtctggatttaagacaaatccggccggtgcttttgtttctttcacacggtattttccaagcggaaggtctttgataacagcttccccatttttattagtggttactgtttttaccagggtatcctttgcatagatcacgtgacggtttccctgctcgtccacctgatgatccggtgtgaaaatatcttctgctgcgtagatttcaaattctgccccttccagggaagtttcttcgtatacaaaatcctttttaaaggattttaaggtttcaccagatttatggatcaccagtttacctttgaccggatggttttcataggtcacggtaatgatggcatccccgctgacagaatccatctgataagctgtattcttatcaactttgatctccacatactgggtattctgggtgtagccatcaggcgctctcacttcctcaatcctgtaatttccgcattttaaggattccggaagaatcaggtaaccattttcgtccgtaaaataggatttatggacaaccgtatttggataggtcgttacctgttccacgtactttttcgcatccaggtcgtacactttgaattctgtattggcaaggaggaccggctgtttggtctcatcatcctgtttcacgatcttaagctttgctttgaactcatcgtccaaaaggactctccatacctgcggtgtgctgctgttctcggttacggttacgataaaatcatctaccggcatgaaattatgcggtgttgtggtctcacggacaatgtagcgtccataaggaatcgggatgctgcacgcatagccgcgttcatcggtaaacatttctgtttttccatcttccgtaagaacgatcggggtcgcatttgtaaagtcatagcttccatcgtcctttacagtcaggctgctgatcagataagcagagaatccggcaccttttaaaaggtccgcatcggtcttatcattatccgctgctttaatcaactggaatggctgtttgatcacgtcttctttggaaacggtatttcgttttaccgtctctacctggtctccttcgtagttacagtttacatcatgctcctcttcgtccagaagataacctactggaggcgtgatctccttcaaataatactttccaagatacagattgcttacgcttgcttttccctctttatcggtcgtcagggtagctacctgttcgtcctttttataaaggactccgctcctgccatccggatggttaatgtcttcccttgcatagagcccgtaaatggctccttcaaatacggcatctccctgtgcgctgtttcctgtctcgctgtcttcttttaccaggtcgattgttgcatttacacgcttatttgtaaaggtatggctaaagtttaccttttcttccttatcattggtgaacttaaaagtgaaggtgtaagtatcctcactgtttctaaggtaaagttccggtgcctggatctcccggatgctgtagctgtaattgatcggaagttccgctttataagaagcttttccatcggctccggtcgttgctttttcgatcagggttcctttgggaacaacggtcttaccatcaactttgatatcttctgctgcatacagcccgtagatgcctccggagagcggattttttgtctcttcgtcctgcttttccacacggactgcagccttctggcgttcatttaaaaatgttgcactgacagtctgcacttctacggtctggcctgcatacacaagctcaacagtcttagactctcctttgcatacataattatccggagctttcgtctcggttactgtgtaggtgccaagatagagagtgttgtggtcaagcttttttgtaacactaagggctaaaaaaatcctattatgacgatgcccctttttcaaatggcatcatgctgtttttcgtgcttcaaagggggttttatagttattgtaagaatgaggtcttctatgattatacgttgtgtaagcaaattcttctattgctgtatacaaagcttcttctgtctggtattcatgctgatagatcaattcattttttaacgtgttgaaatacctttccattggtgcattatcatatggatatccggctttactcatactttgtgtgactgccatccgcttacagtattctgtaaaatctttagaagtatattggcttccctgatcactatgtaaaataagtactcctttgacttcagactgggactctatagctttgcgcaatgtgcgtatagcaagctctgacgttatatttcgatcagttatgctggcgacaacacttctgtcatgcagatctataattgtacagttatatctcttgcttccatctgatagatacagataggtaaaatctgtacaccattttgtattgatttcatcgcatgtaaaatcctgttcaagaatatttctaaataatttatagggatgccctttcgtgtatccaggctttctgcggcggacaatcgattttaatcccatttctttattcatatatctatgtacggtcaatgcgctgagattgatattccggcgttttaaataaactttcatctgacgataaccgtcaacgcccccatgttcgtgatagatcgactgaatctgatcttttatctgagattttctggcatggtaaacagacttcctgtgttttaggtagttataataggcatttggataaatggacagtcttttgagcagccatcggacaccaaaaacaggatgatatttttcaataaaccggtacgccgttaaccgatctcctttgcaaagaatgccgctgctttttttagaaaaagattttctttccgtgcttcttccagttccttgcgaaggcgaagattctccttcataagatcagcatcatttaacgctgtcggatcggcatttacttttttctggcattcattgctgaataattcgacccatttggaaatggcggatttagacacgccatattcctgggtaaggcttttgtaggaacgtccttcttctaaatgaagacgtacaagctttcttttaaactctggttcataaacttgtggcataataaatcactcctaatcgttagtatatcttatcagccaccaatgttacaactatagtttatcacaacagatcctttaacgtaacgcttccgtcatctccggtaaccagattatccttgacaagtgcaccttttttatagatgagggtgccatctgccgccttgatatctgcacctgcataaacactgtaaacggctcctttcaatttccgtttttcgtaggcaaaggtcacaccatcttccgtgacggtcgctccagtaagcacttctccttctttataaatggtgagtgcacctttttgctctttatccgttaagttcttggaagcggtctgccccacgaccagttttaccccataggctttcgtatccagcacatatccggatgggcctgagatctcacgaaggtaaacggtatcctgtgttttggtgatctttacttcggattccccttttgcatttgttgccggcatttttttgataagtttcgtgcaggcttcatctgcatagatgccgtaaacggcacctgcaaggagcgcgttgcttcccttatcttttttgatgatcttgaccgttgcttcatccggccagtctacctccaggttcagctccagtgtatcggtataatatccaaagccgatatcctggctgttcgccagctttaagagcatggcatggaaattaagcggatagttggatgtgatcgcatattttcctttcaggcttccaatattctgggtggttgcttccagatggaatttttcaccgccctttacgctcacatttccggtcccggtttttcctgtcgtctcatttacaagggagaccccgttttccagatggatcgtgatcacaaaagctgcgtttgccttccatgtgaaggtcgggctctggtttccatttgcagaagcactgagcccaggtgtcagctccatggtcgttggatccggcatctttgcaagggctgccttgatctcttttaacatgtttttggcagttgtcgaaagggatcctccaaatccggattccccgtcatataaataatcgaccagataatgctgcattgcacgggtctcggaggaacagccgtatttttccatgatggatttgatattatagccgttgaatgtgccgccccatccgggaccgccatatccgtaaaacatggccttccttaaataacggtcatcgccgccctcatccagttcgaccatatttttataagtcgttccacttggcggggactgtttactgtgctgcatgcagtatgcatagacggtataagtctttccgcctgctttgtaacggatatacttataggaatcatttccgccctgtcccataacagaatcaaaaggatgcagttttccatctgaataatagtaataggtattagcttcaatgtctgttgaatcatcccacaagtctccatcggaagctgccatggtactaataccgccctcagcctggtcatataccacacttaatgcaacatcatcttccggcatctcaaagctgaaggaatttgttccctcatcgtagcttacttctgcatacagaagatcttcggtattctctgtctggtttgcttcgacaagacttgttcccactgcgatcaggcttccctgcgggatatcaccggaaaagttgaccgtctcccccgtctggtaacgtccgtcctcgtggtccagttcaatattgaattcatttccctgtacgatgtcaacctgatggcttccatcctttggttcctcatcggaaaattcttctgcttcctcttcttctggctcctccgtttcttccggctcttccagggtttccggggcatcttccgggcttatggtcgggaggacggggtctgcctccggttcgtcatcgccgctttcctgttcctgaccgccattggatccgtctgtttctgcttcccttggtgtcaccgtaatgtttctggcaaccagataggcttccccggatgcgggtgtaacaagatatacgcatttataggttcccgcatggttataatcaaatacagtcccgtcttccattgctgcttttttcagttccacatggtctccttcagagagtttcagtcctgtaaaatcattctggatatcaaaggcttccccttcggtaaccataagcgcaagttccggatcagcaacggtttcctcgatcagttcttcctcgcttttctccgtctgcgtttctgtctgtgtttctgtctgtacctcgatctgcgtctcgctctgtgcggaaacgcctcccacctcagcggcggatactgcagaagctcccgtctgcaagagcgtagtgcagcacagagcaaaagccatcgcacccgccatccatcttttcttccagtttttttccaagtgcacgttctcctttcatgatcgcttttttccctgcagttttcttttggtccgtctcttatctgcatcgctttctcctttcttccggctttttcagccagataaaaaggaaactgaaaaaaattccagtttcccttttatctgaccaaacattttatgccgtcttcctgtgttctttttcctctttttgaaggatccagtcatccacgcctttgtagtgttccatccaggtaccggatgcatcggtatcccaggtgactcttttgcaggatacgttcagttcctcacagatctcatatagttttatacagccttttcggatcatgtcccgctttctgcgctttctggggcattctccatgatacagatgaattccatgttcacattgccggcacgcacttttttcatcgtgcttacaggacaattccatcattttatccatgtcgtaacattcgtaaactctgttgtgataaactatagttgtaacattggtggctgataagatatactaacgattaggagtgatttattatgccacaagtttatgaaccagagtttaaaagaaagcttgtacgtcttcatttagaagaaggacgttcctacaaaagccttacccaggaatatggcgtgtctaaatccgccatttccaaatgggtcgaattattcagcaatgaatgccagaaaaaagtaaatgccgatccgacagcgttaaatgatgctgatcttatgaaggagaatcttcgccttcgcaaggaactggaagaagcacggaaagaaaatctttttctaaaaaaagcagcggcattctttgcaaaggagatcggttaacggcgtaccggtttattgaaaaatatcatcctgtttttggtgtccgatggctgctcaaaagactgtccatttatccaaatgcctattataactacctaaaacacaggaagtctgtttaccatgccagaaaatctcagataaaagatcagattcagtcgatctatcacgaacatgggggcgttgacggttatcgtcagatgaaagtttatttaaaacgccggaatatcaatctcagcgcattgaccgtacatagatatatgaataaagaaatgggattaaaatcgattgtccgccgcagaaagcctggatacacgaaagggcatccctataaattatttagaaatattcttgaacaggattttacatgcgatgaaatcaatacaaaatggtgtacagattttacctatctgtatctatcagatggaagcaagagatataactgtacaattatagatctgcatgacagaagtgttgtcgccagcataactgatcgaaatataacgtcagagcttgctatacgcacattgcgcaaagctatagagtcccagtctgaagtcaaaggagtacttattttacatagtgatcagggaagccaatatacttctaaagattttacagaatactgtaagcggatggcagtcacacaaagtatgagtaaagccggatatccatatgataatgcaccaatggaaaggtatttcaacacgttaaaaaatgaattgatctatcagcatgaataccagacagaagaagctttgtatacagcaatagaagaatttgcttacacaacgtataatcatagaagacctcattcttacaataactataaaaccccctttgaagcacgaaaaacagcatgatgccatttgaaaaaggggcatcgtcataataggatttttttagcccttagtgttacaaaaaagcttgaccacaacactctttttaacccctgctctttcagttttcgcaagacagtttccagtcctttatgattggaaactccagggactccaatataaggatttcctgtacacatccatgcgatctctgcctttaagatcccttctgttacgtaaaccgtgccatcctttattttcccaaacattcctgccgggctgccgcttgatgtgcctttttctaagccgctgctggtaaaccagaggtacttccgttcttttaaaggaacatccagccggatctggaatcctatgatccgttccttcccatcccggaccgggcaaagatacccgttattcttcctataaaaagcagcttcccagtcaccatcccggttgatgaaaaatccaggaaccccatccaggcgaaatcccttttttaagagctttctggcaatggccacggaattctcctcatccgtacttaaaaaacctcgttcttccatctgtctgacctcatttaacgtcagcccacgtaggagaaggttcctccggtgtgtttccttaagcttaagaaaagtgagcatttccttatatacattgtcccggtaatcccattcctcttccgtaagggaaatgcgtttctttttagaaacgatagaagcgaacccatttcgtgtcgtggactgctgccttttatccgttccagaaaaagaaagtgcctgctttatctcccggtaggcttctttataccggtttctcccgtaaatgccggatagttccgcatacagtgtcagcatgtttccggatgctccgcaatgatagcaatggtaaacatttttcagttctccatttttgcggatgcaaaaactgcattttcctcttaaatccccgcaaaaaggacattccaccggaaattcgtcctggtaagaatcactcagtcttcggattgacaaaagatctgctacttctgcgatcgtaaacgattctctggcatacatgccttcctccttttcataaaagatggccccgttcccggagccacctcgaactgtttctctgttttcaggctgctttttgcatttccttttcatgatccaaaaggatcttcgcagctttctgtatttcctgattctggcctttgtaacgctgtaccagccatttgatcgtctggtaacctctggcatcctgcatcatttccccaagaggggtcccggcatagacaccaaaattacagataaccttttctgcccatttcacttcatcctctgcatcctcttcgtgagccatatcctccaacacttcctctgcagtctcttctggtgtttcttcctcttcttctgcatcaaaagaaatctcatcatcttcatcaaatggaacttcatccgtttcttctactgcacggaaaccgtctgcatccgtctcggcagtaatttcctcatctacggagatttcctcggtctgaaccggatcttccgcttttgtttcttcatcggaaaatttttccagtccgctttcactttcttccattccaaaagtcatctgtccaggaaggttttcttctgtatccgtcactgcatattccacttttacaggatcttctgatatggcatttccatcacgcagttttttacggtccgttttcttttccctgaccggttccgtttgctcctgctttgctgcggtttcttttctttctgtcttttccggttttacggaagcttcctgcttcggcatttcttctttttccgtcccacgcatgtccggatcgtctattccagatgcttgcatgatgttgaatttatttaagaaataatacttcaggccatacgtccatgccgcaccttttgctttatccggtgcttcattggttccaatgacatgcaaaaagctccgtaccttgtctcccggacggtctgcattggtccagcacagctccagatcagcctcatatctccagagtgctcccatttcctttaaaaacacggaattgccctgttcgtccatctgtgtcggcctttcacttaagatgtcaaaatcgaccccgtatttattaagggccggtgtcaggcattcataaatatcatccagttttacaaaatcataagtaacgtcctcactgtaccgtttgcggatcagcttcggcactttcttccggatcctgatcatcttctggttcagattcatgtaattgtatttacccatattattcgtttcctcctgattttttcattttttatactaagcagaacgcggaaggcttacctccggccctgtcccagtcttttttaacatttcttccatttcctcccggatacatccgatacagatcttcttttttgaaatctccggaagtttttcaagcagccacttctgggcgaaaagctctgctgcccgctgtgggttgcttaaatattccagaaacatccagtcagaaaattcccacttcatatccgcaaaatgaaactgcggctgatagatcagatcctccggccgctttccttttttaataaaacggtctgcatttagctggatataaaccctgctgatctccgggatcatctgtgcagctgcatacccgccttttaacaaaagttcatcccattgttcccggataagtttctttccaatgcggcttatctgtgtttccagtttcgggatcagatcttcacgcacaggaaaaccaaaatcatccggtatcccgatcggcttcagaaaaagatcttctgcttcataaagggaatactccggcatgtggatcacggcacaccagttccggtctgtttttctgttttcctttaaacagtcaaagaaaaagaaacagtttccatatcttgcctttataaacagttgtccggaaaattcttttacttcacaatccggcgatttcagccatgcgatcagtttttctgcctccctgctctcttttaaccagtccggaagttttctatccatcacatacctccgtaatttagatgtatggcagggaatacctggaatacaccatctttgcccgttttaaaaatgcagagcctttttctgcttttgcaaaccattccacgaaaaaccgtgtcaggttctgctgcagtgtccggtgggtatcaagggcataatccacaaattccccatatccgtccatacttcctgcaagcaggtagcaggtaaacatttttgccatctgctcttcatctgaaggattgatctccatttcctctgcaccttcatacaccaggcgcaccctttctggctgttcctttacatgcaggcacagatcatcggccatcagtttcgatgcttcgtttcgaaggtcgtaatatctgacctctgaaagaccttttagccaggcaaagccaagatacgtgtaattgtcttttatttcctgctgctcttttgccatggactccataaattttttgtgtccggtgggatggcagttcaagtattcatctaccagcagccttgccacatcttttccattcgtaaccttcatgttttcctcccatcaaaaaaagacagtccatgctgtctccattcttttaaaccctgttagtattttacagtgccaggaatatcatattcatgccagcgttttgacacacagccggcaattttttcttccagagctaaaagtcctctctcattcgtcttttcctgccttgcaatggtaatggattcacagatcccgcagtagatctcgtatgcgctgcatggctcattcccggtagtagccttaaactgctccacggtttctgcaagcagtttttttccaaatcccgcctgcttcatgatccctgccatggcatttgccggatgctcgatccagatatcacacagccgcatgaccccttttaagacttcccggtagtaatcaaagatcgactctatgttttccgtgaaatcttccattcctttacagtttttgtgcgtaaccttcagggcattgccaaggatcacatttcttgtcggctcctgcagggaataaaaaatattcgctccggacacaccaacgtctgacgtagtgatccgtacaactgcttttatgtccttatcggtctttcttccataattctgcatcagttccttataaacatctgtaagtttcgtatcttccagctgccaggacgccgtaacagaataatggtctgcatagccgtttaaaaacgttgccttctcatagtccccatggatatatgccgaggtaaccatgtacatatccggcatggatatgatggcataatctttttcatcaccggacaggactgcccttatttttccttcacagaaacggattagtgctcttcctcttgcaaccttcaggcatttattcaagatctctgccagtgttttcttatcgacatctgccagggctttgccatcaatcctggcccgtcctttcaacgatttgattgctgaatttcctatataacagatcctctcgggcaggataagaaccagcctggaatgagataaggtatctttttccagtgcttccagggaaatgcccggaacctctgtacaggtttcctctcctgcagctgccacctttaatttcttactggtgatccggatccattctgcccggctgtctatctcttccagatactcgcacagttccttttctgtccggaactccttataaaagtcatctttataatacataatgtccgcctttccacgctagctgaaaatccggacttcaacagcctgtatctttccatcttcgatgcaaaatacatagccgtcttctgccatctccataagcattccaatttccagtgcatttgcgttttcccatttaattgtctccataatcgaccctcctgattttacaatgtgttttctttttttgatgttcttaaggtatttctttttgcagtttccttaactgacagtttcattcgtgctcctcctttctgctttttatgcaataaaaaaagacacaaaaagaatcttctttccttcttgcatcttccttatattttgcatatccattttttctcattaagggcaagaccgccccaaagtgtttcttccggaatgtccggaactaaagaataaccacagtcttttatagactgttaaattatttttcatttaaagactaccacaacattttgtggttgtcaattaattttaactatatattgtgttattgtgtgagctatctttattattctgctacatgttgtgacaggcggcatgataccgcctgtcttttcatccgtctgcataagtgcatgtatctgaggggaataggtaatctgtacatgcactatgaaaacgtcttactcagcgtttggatccgccggggaaatatttttggcaaggcttcgcccgttggcatccgtccctgcttcaaaaaggaccggctggccaccgcttaatttccggtatccatccatctggatctccgaaaagtgggcgaaataatcaatcccgtcttcaccgatgataaagccgtatcctttctgtgcgctgaaccatttcacggttccctgtagtgtttctgacatgtccttctctcctttgctgtatttcccgcaatagtcttttgcggaaacagggcagcatggaatcgaaccatgcctggtgctcccctccctgctataaaaggaatctcttcctcttatatttcttcgtttcccaaaaaagtcccgttattgagtgctgcatccacccggcggattcctaccagcttcttttcatttatgccaaaataaaaccggtaacgttttccctccaaaacttttacgtttttatccagcaaaagttcactctgccgtccggccggatcacttacccggatcttccgtaatcttgcaaagggatttttcccgtctatcccggttaccagcccttccacgatttcataggtctttttatccgcggtgcggaaaataagatatgttcttataaacccgataatcccaagcaggaaagaccagaaaataaaagttttgtctttcatccatgttcccataaatgatccgaaaagcaggataaaaagagacaggatgccatatcgctggatcctgtccttaaaaaaatccggtatattctgataacgtgttccaaaatcttccaagcatctatacagcctgtgccaatacggatgttccgtttgcttcaaggcagtcctcccttcttatgttgtcgatcacaagctgtttcttatagtaaagctgcgctacacggcttataaattcccgttgtatctgttcctggagggaatctgctaaattgggttccctgctttttgcctcttcttttaaacatttcaggtggcaggaaacatccccttctctttgaagataggaaagtagctggtattcctcttctgtaagcagcggttttttaaaagccctcagtgaaaacttcagtccttttcccatggaaagggcttccataaaatgcttcatgcgttctgtccgtgaaaaggccatgggagccatgactgaccggctgataatgctgtatacagcttcctctctggtacatccttctgtcagcacaaccaggccccgctttaccagacggttcaggcaaaactgaaaatcctctttgtccgcccattcctgtgcctgcttttctccaaggctaaatacaagaagacgatgcatctgggagtggaccttatcctcttcacagaaagaccaggtgagcgcagcccacaaaatagtttccatttctgtaagtactttttcttccccatctacccagacacaaaaccttccatctgcatcatcttttttcattccgattgctgtataccatctcatgacatttcctccttgtcattttcactctttctaatctctgcttctgatctgttttcttttatataacttgttacccatacatcatttccaggagttttggaagtacataccccaaaagcatgcctgctgccgtacagattccgatattcggccgccgcagtttccatacttcctgtgttttggtcccgataatccttgttcttcccggtacgatccacctgagtttccgataaaactccatgaatccctgattgtcaaagccaaaggatcgtacacagaaaacatcccgttcctgttcttcttcatccaaaaggaaaaagcttttctgttctttcccttcttttcggatcacgatataaaattctggaattccccgtctggttccttctacgatcttatccatctcatcgtaaaagatcctgcaggactcatattttccgtttttttccggctggcagactgccaggctgtcctcttcaagtgccatataacagttttctgcctccatgatcctccgactgatttttatggcctgacgaagaagcaggattatcgcaagcgccagtgcagtacacaaatatacaagatcccagcatcttttctggtatatgaaaaagtatgcgctgattccctctgccacactgcatattgctgtcataataaaatactgttctttaaggtccatcagatgatatacatcatcttctgtcgcctgtagtctcaagggcatccatcctttccgtcatgccacgcttattttatccggggatttctttttttcctctcggctttttatatagtctgtacattcccggatggtctgttcacacaggtaataagaaaatttcccgatatgtgtgtccttttcccggagattcaaacggttctgaagccagatatatgtgctgtgtttggtcatataaccatttttccagattgcatccaaagctctgtgtgcttcgatccgcttattacgcagatcgctgtcagccatggttcccatgggacgcatactttttttgtgtgccccaatgtatgaatcacaggaaggatagccgctgcatacatacaggtatttctccggatccaggttgttatctccatagacataagctgcaggcctaagtaccccgggtcttttgcaatatggacagtacaaggtttcccgcatctgttttttcttcttttttgccatctgacgtcactcctttccatctttatctccgatgttaaagaaatccctttttctgtgtcaacagaattctttgaaaattataaaaacattttcaggaagctcttttgataagccttgtgataatgccttctgccacttcatagttgtcgttgatgcgggtcaccacaaatccgatcttatctttctttcccggaagtgcggacatattgcaggaatgtgccacggcattgactccgatatcaaggcggataaaataggttcccttatagacttccgtaatgattcctgtatattttccctgtttatggcatttccggaggttatctttattgatattggctgtcggactctttgcatccacttctataatgatctggtcaacagagcttgcttccaccttattgaccatgaccagcaccagatcgcctacctggaatttttctccggcatctaccatccactcccaggccatgtccctggcccggacagatacttctacaccaaagacttccaggcggactgctttgggagctaccgcgatcacccttgcttctacgatcctgccttcatagagcattggtttttctgtatcttccccaaggtaaaaagtctgtctctttttaagcattgcatcttttctggatgctacaacgctccggctcttgttatccagatctttgatgatgaaatcaatgtcacagccgagcatgttgttagcaatacggacctgacggtttaaggtatccgcgttttcacgcccgtctccctgaaggttgatcatcatttcattcattgggataatgatccggaaaccattaaagtatgtaacagcaaccatccatccactctccagtttttcaatgcccccgagctggcccgtcaggatctttctggtacgatgtgcattcaaaagctgatgccatctggcttcttcctgttcctccatactttcaacctgcgcgtctacatcgattgtcaaaacaccatcgtagactgcacgcggaacatctttttccccatttcccgccaaaactgtttttttggtatcctccatatacttcctcctgttcttatttattttttgtcttctctgctccatccagaaaactccttttcctccggtactcaggaaagacaaaagaagacacaaaaaaagcagcccgtttaaagctgctttcttcatgccttctttttacagataccattctataatacatggaattctatgtcaatattacctcgattgcaatagtgtcgcatattgattccttttatgaagcctgtacgacagaaggatttagtaacactaagaactgccagattcctgtgtccttatagaaaattccatctcatatgtaattgtttcattatatagtgtttatttcttcctcttaatcgtccccaataagacaaccgaccttcttgtacatttttaaactatagatattacggaacagttgcagtagatatatattttttcaaatagctgaaggataatacctgattatctgttatttatatacataatacatattgaattttagtaaaactagaggatacataaaaatgccattaaccaaagaacaatttcttaaacaattaaattctgattgttatttctccacatactcttctgccatatgtactgccatagcaccatctgccactgctgttactatctgacgaagtaactttgttctgacatctcctacagcataaacacccggaatactcgtttcagtgttttcacctgccacaatatatcctttattatccagttctatctgattatctaaaaaatctgttgtcggttttcttcctatactcacaaacaggccgtcacattctataatgttttcttctcctgtaactgtatctttcaaccgcacaccagtcaatcgttctccataaatcagttcatttactgtattgttccatcgaaactctatattttcagttttcatcagctggtcatggtagattttcgttgcacgtaatgtatctcttcgatgaacaatgatgactttcttagcaattcgacttaaaagaacagcatctgatacagcagaatttccaccaccaacaaccaccacgatcttatctttataaaacataccatcacaggaggcacaataagcaaccccatgacctatcaattctttttctttagcaagaccaagttctcttggatttgctccagtagcaatcactactgttttcccaatataaattcccgaactagtttctactctcttaagctttcctgttaaatccatattataaacttcagcatattcacttttagcgccaaatttttccgcctgtttttgcattttctctgccaatgaaaatccgtcaattccattttcaaaaccaggatagttatcaatctgccaggtcaatgacatctgaccacctgcagataatttttctataacaattgtatcaagtcctgctctggctgcgtataatgctgaagtataccctccaggtcctccacccacgataatcatatcgtaaacatgattttcattcatacagcagtcctccttttatttttccaatgcttcattaataaaattctctatcattatttttgattcaggtgcaacaatagaatctattgcctttccatcccgatataaaaccagcgtaggaattatctcaatcttttcagcttctgcaatctgtggttcttcatcaatatttacttttccagcaataagaatatcgctgtattcttcacttattttttcataagccgctccaattctacggcaataaccacaccacggtgcccagaaatcaaccaaaaccggtttttccttatgaattaattgtccaaacttttctttatttatatttatagatgtcatatttttcaactccttctcctatttgaacttaatatatcgcataaaagatcttgcttctgtgatgatatcacagaaaagataatttactttattacacttctttttatttctatttatggcatatgccagttacataattgacgcatctaaaaaaagcaagtatactatgttcgtaaaggagataacggttatgaacttcgaaaattgttttccactatggaatgacttaaatacaacacagaaaaaaataatttcagacaatttaatcacacagtatgtaaaaaaagggacaatcattcacaatggaaacctggactgtactggattattactggttaaatccgggcagcttcgaacttacatactttcagatgaaggacgggagattacactttaccgtctgttcgatatggatatgtgtcttttatccgcctcatgtatcatgcggtctattcaatttgaagtaaccattgaagcagaaaaagatacggatctttggatcatccctgctgaaatctataagggcatcatgaaagaatctgctcctgtcgcaaactataccaatgagttaatggctacccgtttttctgatgtcatgtggctgattgaacagattatgtggaagagtttggataagcgtgttgcttcatttcttttagaagaaacatccattgaaggaacaaatgaactgaaaatcactcacgaaactatcgcaaaccatcttggttcccacagggaagttatcactcgaatgcttcgatactttcaaggcgaaggactcgtcagactctctcgcggcaaaatagcaatccttgattcgaaaagactggaaacactacaaagatcataaaacgtttttttctctaaagaatcctccatttatcagaattatgaaagtcattctaataaatgggggatctttttatactacaatcaaactataaaaatattttatttatttctaataatccataccacatgcatatgatctttcaatcagtgcatggtcattagccactgcatcataaaagcggaatccacctgaaaagttgtatgtttcatatccatttccttccaaaatacggcttgcaatataactgcgtagcccactctggcatatcaggtaaacgggctttcccttctcaatttcattgatacgttcccttagttcatctacaggaatgtttttgaatccatccatatgccccctgttaaattcacctacagttctcacatccagcaacacaacacttttatctctagaaatcttatccatatcttccagatgccattgttttaaggtaccttttgctatattgtctatcatgaatcctgccatatttacaggatccttggcagaggaataaggcggtgcatatgcgagatccaaatccttcagctgggttgccttcagccctgcatgaattgctgttgccagcacatcaatacgtttatcaactccttcatatccaataatctgagcaccaagcaaacgataggtctctttttcaaaaaccaccttcatggtcatcacttttccaccaggatagtaaccggcatgactcataggagaaagaattactgtatctacctctaatcctgactttttggcattggtttcattgatacctgtagtggctgctgtcatatcaaacacttttataacggagcttccctgactgcccaggtaacgactatcaccgccacaaatattatcagcgatgattctgccctgtttattggctggtcctgccaaagaaatcagcgcatcattacccgtaacataatgttttacctgaactgcatcacctgcagcataaatatccggtacagaggtttccattctgtcattcactacaatactttccttgatgccaagttccagaccggcttcttttgctaatactgtgtctggtgtgactccgattgccagaactaccatatcagcctgaagggatggattatctttcaacaggacctccactccggtgtctttttctttaaatccttctactgtatagcccagtaccagttttatcccatgttttctcatttcattatggatcatggatgccatatccgggtcaaaagggttcatcagctgcttaggccgctggacaatcgtaacatccatgccaagctccctcaaattttctgccagttccagaccaataaaaccaccacctgccaatacagccgattttggatgattcttatttactaagacttcccataccttaaataggcttcgcaccttgaaaattcaatatttcagctaacaaaatagcgatttatgctactatagccacaggatggagcacgctcctcagatattcgggcagacgagcttcaaaatcagcagtaaatgctgccagctgattctcgctgagctttaatatctcctgaagacttgccatgaaagcatccatcagaatgcaaagagatcttgaaaagctaatatccgccatttcatccaccaggaagaagaacagttctccaagcgttctctggtcttcgttttgacgttgctccagagcaagtaacatatatctggtaaaaacaattgcggtatgagcagtcagtgcatcataggaaaggctgtggcattccccgatcagattcagcatggatttgcaggttttgaagaatacttcaatctgccagcgcttgccataaatacggatgatctcttcttcagaaagatccggatctgtgcagaggaacgcaagccagtctttgcgattcgccttgtttcgcacacatacgatttttgccgggaaagggttctctttcccgagcatgatatcaacggaaagcaggtatttcgatctgccgcggcgcttcttgtttctggaatagatttccttgatgttaagctgttcacccttgtatccgtacttgatccggctgcttttcttgatcatggcaatgacatccatgtttctggatttaatggctgtgatctgtgccggattggcaaaccagcagtcgaacaggacatagtccgctgataatccggaagatgtagcagtatcaagaagcgtgagcattacttcaggtgctttggtctgagccagctttctgcgctttccggcaatggtccgcttatcaaatgtatgaacaggcccgatgacattggactcttttgaagatgcgaccagacagctgttaaccgggatcagggtattcccgtcactccaactgagtgtaagcatacggtatccctttttataggtcatatctgtatgatcaaaaacacgggatcccaattctgtctttttacagctggatcggttgaaaaggctgtcatctacaataaagacattggtgcgcttttgatctgtaagattcttcagatcattgttgacaatatctgccgcaagaagagaagtgaaacgaagccagtttgtctttgtggaattcaggaaacggtaaaaggtatttttagagaatccttccttgaaggatccactgcgttgctgcatatacatacttcgccctacgaaaatatttccaagcttatacctcaaaagagaaatggcagggacacctttttctttcgtgccattgcatttagccagtagttttccaatatggtgttttgaaaaaaatctctggatacagtcaagtagagctatctcgttagtgttgttctgtgctataatggacatggcataaatctcctttgcgaaaatggtttttggcaatttcattatagcaaatggaacgtatttatgcctttttattggctgaaatattgaattttcaaggttcaacacactttattggtgtgggaagtcttagttatttatatattcctttatccgaaaagtgtcttctacagtacgaagtgtaaaaagtttatcaatacctactccgggaagtctcggctgtgttggctttgcacctggagagaggatcagcttatcatatttttcttcaaatatctcaccattctctaaatttttcactgaaaccgttttacgttccggatgtatggagataacttcatgatgaattttcatgttaatacggaagcgtttaaaaaaactctctggtgtctgtagtgtaagttcttccgggtctgtgatcacgtctccaatataatatggaagtccacaatttgcataggatatgtatccggatctttcaaacacagtaatttcagcatgttcattcagtctgcgtattcttgctgcggctgtagctcctccggctacacctcctacaattattaccttcatcttatttttccacctttcctgagtaagctacaatgccaccgatattatttactttagaatatcccattcgttgcagtatcccagttgcctggcggcttcgtgaaccggaataacagtatacaaacagtgggatatccttattcttcgctacagaagcaatattgtcaagttgctgcaacggcacatttttactttctggtatatgtccttcctgatattcctgcggtgtacgtacatccagcagaactgcatcatcagtccttttatattcttctatgccttgattaatattcgactgtttaaagagatcaaaaaatcccattagcacaccccccctaaagcatttctaaaatcgcattcttaggtctcgcccctgaaacctgctgtacaatcttcccattcttcataaccactaaagttggaatgctcataatactgaacttatttgccagttcaggctcttcatctacattaatctttccaactttaatatctctacgctcacttgcaatctcctctacaataggtactaccatacggcaaggcgcacaccaagatgcccaaaaatctaaaagaacgggtttatcggaattcagtacttcgttctgaaaattatttttattgatattaatagcagacattttacagtcctccttatctttctctttttgtagatttattatagtcttaatttcatttattttccgtgattacatcaccatacctcattaacttaacttcttgccataccatctacacttaatataacacctgtaatgtaactcgcctcatctgaagcaagaaacacaaacgcgttggcaatatcttctggctgtccaagacgacgcaatggaattctttcaatcataggttcgataacttcctttggcacggccttcatcatatcagtttctgtaattccaggtgcaacagcattaacacgaatacctttaggtcctagttctcttgctaatgatacagtcaatccgtttactgcaaacttcgatgccggataagcaaacccacttggctgtcccgaaatactcaccatggaagaagttgagagaatgacccccttgcctcttgccaccatacattctgctgctacacgagtagtattaaatactccttttacatttagatccatgactttatcaaaagtctcctctgtataatccataaatgaggtgttttctgaaatccctgcattatttaccagtatgtcgacacatccatatttttcagttgcctctttaaaagcctttctgacagactccatgcttgccagatttggactaattccagcaactattgcattgggtgaatattcttgtgcgatgaaatcgcacttccggaaatttgggaatcagatgtccggaagtggaaatcacctatgtaattatgcgagtttactcgcgcagttctttatccaaaccatatacctcacgcattgatctatcatgttcagcatcaatgcttgtgatatttattcgatagctgtcgtgggcaatacggtcaatgattgcatctgccagaggactgtcaccaccgccgagctgctcataccattcctcgaatgcatactgggaacagaaaatcgttgaagatttcttacgtctcctatgaagcagttcgaagatgtccctttgttctgaattcgttggtttcaatagaagccactcatccaggatcagaacaactggattggcatacttcgccatgacttttttgtagttaccatctgtccgtgctgtctccagatcaataagcagatcagggagtcggacatacttggtattgaaatactgcttacaagcctccatgccaaaggcacaggccatgtatgttttaccacagcctgtagcgccgatgataaaaagatttcggtgttcagatatatattcgcaagttgcaagccggttaatgagatccttgttaagcttgcgtccggaagtgtagttgatatccatgatacttgcttccggctgatcgaatccggcattgcggataagacgcttctggcggttattcttgcggttgctgtattcgatatcgaccagcattccaaagcggtcttcaaaaggaacttccttgaatttaggatcgtcaagctggttacggaatgcatctgccattgttgtaagacgcatttcaataagtttatctattgtactctgatttgtcatgtgtgattacctccgatagtagtcggcacctcttgtgatgccgtgtgctttatgtgtggtcttggattcagtagtttctgattccagttttacagaaccagttacaaggatgtttttaatactcttgtagctgggcgaagatgtataggataacgcctttttacaggctgcttcaagcaatgcatcggagtatttctcagcaagcttcagaagccccatacaacttcggtaagtctgttgttccacacgtttggaggtcagtattgcattgaccacagtgtacgtatttatgccaatccgctcagcccatttgcggaaccggtcgccgttccattccagatatttctggtggtcttccggcatatgttccatgaccgtgctgtactgcccagggcgtcccttcagacgacggtgggaagcaatgcggttatggttgtagaaaatttcaatagtggtatctgttacctttacatccactttctttttgatgtattcataaggaactgagtatagcattccatccacagatatgtgataattgaactggacggtggctgtcttccagtcgctcagttcaaaacgggtagaaggtaatggtgccagcaatggtttttcttcctcaagaaataaacttcgccgactaccctctttcttttgaaagagcctttggttgaacagttcaagcttgtctctgattgcacgatttaattcggcaagggagaagaactgttcatcccgaagtgctgctgtaatccaggtagagatatttcctaccgtcccttcagcattcggcttatccttgggagccctgacacgcgccggaataatagcagtgccataatgctcagccagttcctgataggtctcattgatctgctggtctttccatccgccattatgaacaactgcagttttgcagttatccggtacgaggattctggcgacaccaccaaaatattcgtacatatggacatgtgcattgatccatgatttctgtttcatgtccagaaatgcttccacgtatacatactggctgtaagtcattacaccgacaaatatgtatgctttgatgatttcgccggtatcaggatcaatgactgttgcaggatcacctgcccagtcaacttcaacctgctcaccgggtttacggttgatatgcatggtagcacgatgcttctgctcatcctgttggatgtgatagcagaactgtgaatacatgagtggttcttcaccattggcacggcaatcctccatgtattccgtccataggagttttttgcttacgccgttgcgaagcagttccttacggatgtaatcataatccggcatccgcttgttggcagataccttgctctctttagagaacatgagcctttgaagctctgtgtcggtcattgattcatcaagaggccaagagatatttagttctctggcacgtttttgaactttgacgacagttttttgtgaaacaccacagcttgccatgatgttgcgttgtgagaatcccaatccagtaagccggatgatttctcgatatttggtcataatcgtgacctcctcataatgaatttacactataaagtgcataacatcattataaggttttaggaaaaatgcgattccctttttgccggaatcgtgattccgtaaaaaacggaatattgatttccatacgccggacaggtgatggatttcaccccggattattcattgggatatttttcttttaatttatctacagcaacatctgccgattcctgtgaacttgctgccaacacaactgaagcaccttccttcaagaatttatcagctgtagcaaatcctataccacggcttccacccgtaatgattgcaactttatcttttaatctcatttagactacctccttacttagtttctaactacattataagcaaaaggtagattattttctgtgatatcatcacaaaatatcgcaataaaaaaccctgttgctcacgcaccagggttttggtttatccatctgtatttaacacaagattaggcttctattcaacttctgaaaactgatcttttccaacattacataatgggcattcaaaatcttctggaacatcctcccactttgttcctggtgcaataccaccttcaggataaccttcctcttcatcatattcccatccgcaaacgtcacatacatatttcattagtttattcctccttataaatatattaatacacagcatatattactgttgtatctgaattattttgtaatcttagcacgaaagtcaagtgtttttagcatttccagagtccatgaagattgcagtatgcgtatacttcttctacatattctccatcacagaggcagaaatccgcaataggttcctgtcctggaattagctgttttctataaataccctgatttgtatttagtgtaatccattcaatgaaatgattatcaagcattggatgttttatttcaccgaccacaacatgtacatgctgtttgtccactgtatatacaggtacatgcttctcaacagcagcatctgtcactccagcttttaactcatgcatagcctctccgcaacacattactggtacgccttgatcctttaacatttcaataatgtttccacaatgattgcatacataatattttacttccatcttttttatcttcctatgtttaaaatttaaaatccaattgtttctataactttcttcaaagcatccgtcgattcttaaactttaatgcttctttaccaaccgatgcagaaccaacaaagccacagcctatcattactgctttttttaataatcactttcttctttgtaataatctccttctctttaatagttctcttcacgtatttcgaaataactctgtggatggttacatactggacatatctcaggtgcctttgttcctaccacaacatgtccacagttacggcattcccataccttaacttcactcttttcaaacacctgtgcagtttcaatattcttaagaagtgcacgatatctctcttcgtggtgcatctcaatctgtttattgtcaatagataatagtaataattactattattataataatcaatattactgattaccttttatttaaaataatcattcaatcatcattttttccgttcaaaaacatattctgcatctgatgataaatcagagcggaatgaatagcctagtctatcaaatttcttaatatcctcaggattttcaattctgttttcagccatgaacctaaccatttcaccacgggccatcttagcatatgtaccttttgtcaccagtttatctcctgataactcacaaaatgtaatcgtaatgtatctatcctgtcgtgtcagatatttttctatgcacttagagtattctttcgatgccagattgattataatcctgctgttatcaatcactgagcggtataataaatctccccagtactcatacagattttttgtttctcctattccaaccttcgcctgcatttccaaacgataaggtgtcacaccatcccttggttttagcacaccataaaatgcagatattattctcaaatgattttgtacatactcgaattgactgtcctcaaacacggatggagccatatattgaaaagcaattccttcatatgataagacagctggggtaagtaaatgataaagatccatgttttccaatctattgaagttctgttctgtaattttgtcattacatttccagatagtcttcagttcttcttttgacttacttttcaaccaactttgtatctctgtcgtcttttcaataaattcaggcaatccatccggcgctatgctgtcagtatctgtaatcatctttttagcaggggataatattatcttcattaatctaattccttgagcatattttcaggatcatttgcagccttgactttatcatttgcctttataataatcccctgttcatcaataagatatgtggttcttactactcccatagagactttgccataatttttcttttctttccatacatcatacgcttcaataactttccgctctggatctgctaaaagtgtaaatgccaatccatatttttcctcaaatctcttatgagaggatacagaatccttactgactccaagaataactgctcctttttcggtaaactgagggtatcgctcagaaaacccacatgcctgtttcgtgcatcccgctgtattatccttgggatagaaatataaaatcactttttttcctgtataatccgataatctatgtattttcccattttgatctggcaactcaaaatccggtgccttaacccctacttccaacattatttatccctccctttctgtatctttctctttattcgcctttttcttcccattcccggtaatcattttatgacctgtatatatcgccattaccatacataacatagaacttaaagcaaagtatttgtgacttgatttttgctttttatatccagtgtaaaaagtcccaagcattgtgatcaatgctcctactgaccaatatttatgtgctttcatgtaattcctccattttttcagtgtattcaattctaattatacgctaccatattcctatgtcaatttgataatagagcattcctataaattttttcaaaatatcattgtcaaaactatgtattgttatcctttaatttttctttgaaataattgacaaaaagcttgctttcaagagattactatttaatctcttttccatctatatatagttgaaatttatcaggattattgacaacatcatagtcctttccgtattctacaggtctatattcggctgtcattaccgattccccgtcttcaatatcctctttccataaatagatgttcatatcaatgctcgtcgcatatcctctgtctgtggagaattttgtcgaatgaaaagagactttacaacttaaaattggataaaaaggacaaaaaaaagaagagctgcttgctcttcccatatagtagtagtaaaataatatgtcatgccagcgcaatatattacctagaatatcgctataacaggaaaggggctgcattgtgacagcccctaatttacttcatcacgttgtctacattctgagtgaactcgttccctggtttattttagcatcggtctggattttgtttcataaagataaattttgccacagagcggtcgtatgttttaatgtgtccaaacagccagtcgattacatttttctgtacaagttcactgaaccgatctgttggtccttcatactcctgaaggtattcatacagttcttgaattgtctttttaaactcttcatgtttttcataatgtttttcacgctctggataaccggatttttcctgaagcttttcctcttctttgaaatgaaagtcagtatattcatccagataatccagcattttgattgcttttactttgctgtcgccattttgacaggcagttacaaagttctggatacggtcaatcaattctttgtgctgtgtatcgattgttttatttcctgttactaaattgtcatcaaaggtaatgtttaaatcgtaagtcataatttgacctccatttcttttatatgttctcttaggctcttttaatgtctggcagtttcgtacctgcattttctgcttagtcttctacaggaacgaaaacatcttttcctaatccgcagattgggcatgtccagtcatctggaatatcctcaaatgcagtttctggagcgataccggcgtctggatctcctactgccggatcataaatatatccacatggttcacattcatattttttcatagtcattttccattttcaatgtcgatttatttttgttaccaagttcctagcaatttttctaacactttgtttcttgtatatctgtattatacatgataattattcttttgtcaataatagtaattattattatttttgcacttagcataaactgatatttgaattgcacatttacatattgtatatatcatgggaatagttgaataaaaaaatgaactctattcattaaagacagagttgctggaaattatttctctccaacaactttcttcgtctttaagtccttgaaacacaatactgtcccatcagattcatccaactgttatatttattcttttcacacacctttcgacaaatttcattttccatcaatacacagaacatcttatcataatcaaatgcccaaacagcaccattcacatggttttccactgctttctgatctatgtactttaaacgtgtgaccattttttcaatttctccatttctcaagttaccgatatttttgcagataaaccgaaagaaattcaacgttgcatattcgtcatgccaatggaactcttctggattgtttttaattttactggctcgctgctgttctttgattatttgatcagctacacctttcatcgaatcttcgtatctcatattactcacctactcttcctcaacgcccagtgacggtttaaatcttttatcctttgcctgcggtaccacgatctcgtaaaaataaaatcctaaatatccaagtgcctgcttcttcattttataaaaagaagtcctgcctattcctagctcctgctgtacttccacatctgtcttattataatgactgcaaaaacaggaatgaaggatttcactgagcatcacaccattcggtgcatagaacttcaccagtgtcattccacgatagatcatatcagacaagccataaatgatcatcaggttattcatttcccggtgcatctttggcacattcagctgattgttataaatgctcagataactcaatgcatatgccatatcttcattgattttctcctggcactccatatccagttcttccaatacaactggttttctaaaatcagtttctggtagcttgtcatcagttctttaatatcagtataatgtcttaatcctgtgcatgacttgccatatggaaggtaatttctttcactgatttaattgcataatctctgtctgtcatcagtttcaaaatctccttatcatcatcacactaactggcggtctttcagaccagttcgctttccccatgattttgatgggaagcaattacttactacaacttgcagaagcggatatccaaaaggcattgtgggagctgcctttgctgaccgaaatccatcttcttatgtaaaacctgcaggaatataaagggaaagtgactatccctgccgattaataatccaaataatatcgtctataccaatctctccttatttttcaaagcatctgtaaaatcgttttctatcatttggttataaagtctcttctgcgccagttcatctgtataatacgcatagtcatgattataatcttccataactgtttctgccgccatagatgcataatcatatatggtagctattgaaagattcttatctatatttttgtaaataccatatttaatctttattcctttaatcggagcattctctacaaactcattaataacattgtccattctccgatgatccagctcacaatcatcacttaataagcagagaaaagatgctttttcttttctcaccggtgctgctcaagttcataatgcctaactcatctaatcttatatctgaatcctcacttgcaaacgcaaacactattttttcgaatgtatctgcatttccaattcttgcacatttcatacgataacgcaaaatatcattaccattttttatcctgtaatgtattgtgaactgtgagaccagttgcagttgtttgcatatattattaaaatccgtagcaaccagcattttatttctgtcttcttcaaatacattggtctctatatacttttgtattacggtttcatatgttttttttctcgttcattaattcatctaactctgtgttttcatttagatgtctataaatctgaatgtactgatcttgacgatttacgcaatatatactactaaactcattccccaaaatgttaataatatccgtaatcagcatttttccccttactcttcatttacatatcattttattgtaatcccttgatctttttcaaagatactttcgctgttgttccaaagtttccatgtctctctttctttaaaatacaacgaaaagtgaactcttatgtacttgaagaatctgaaatacgattcctccctgtaaatatcaatctgttccacaaagcaagtgacatgctcccaccacttaaatcttacgattttgaagtgggggcttcctgctcgattaccctttagggcaaagctaaaacaggctatccccgcgtgtcccgcggttttgttttttatgtttatccggttacggatttttttcttgtgccgtcaggcacattctttatagattctttttccttcttcacggatgttgactgctgcattcacatcccggtctatcctatttccacattcacaaacatacattctgtccgacaatgccagttcctttttcttatgtccgcatacactgcagatcttactggatgcaaaataacggtctacttttataagatgttttccatattcttccagcttgtatcccaacatgaacagaaactgcccgtacccgttatcctgcacacctttcccaaggtgcagccctccggacattcccttcagattcagattttccacacatactgcatcatatctttccgcaagctccctgctgagcttatgctggaaatcttttctctggttctttatcttttcatgacataaagctaccctttttttctgtttttgatagttccggctttctttttcacagtgggagagctttctctgttctcttgcaagttttttctctgcttttctgtaaaacatagggtacccggctctttctcctgtagaaaatacacacattccctgcatggcaaaatcgatcccaagaaatctctctgccggtcttttttccactgtttggttctcacagcagaacaaaaggctggcaaaatatttcccggatggctcacggctcacagttacagacttcagtttccagtctgatggaatctgacggtgaagttttatccttatgacggacatctttggaagtttcagatgggtatcctgcaaaaggatatttccgtttagtgcattggtcgtatatgaatttcttgcatgcttctttgatttataacgtggaaatccgcaggctggttcccgaaaaaacttccggaacgcactttccagatgcagctgcgcattcgccagggcaagggaatccacctccttcagccatggatattcctttttatatccggccggtgtgttccggagcatctttttttctttctggtaatagctgatcttatctgcaagcatctggttatagataaagcggctgcagccgattgtttgctctatctgaactctctgctctttatttggatagatccttatttttacggcgcggttcattcttctcaccctggctttctatatactgccgtatcgtttcaatcgttgctccacctgcactgagcaggccgaagatctgaccccagaatgcatctttcatggtctaactccattatatttatcgtcctttttcttatatcgacggatatgtatttatgaactaattgttctttttcagtatactacatcagggaagggagaacgagtgtttcttttatactatagagattttttttgagcagatatgctcagatgtgcaattcatctcaccacctgaagaggtgggagaattcttgctacatttgttaaaatttattcttctcagtggccttaatatatagtttatcaaaatatagaagaaatggatatatattttcttttaatatttttctaaaaaagctttattttatcactcttcagtcaccggacgcatcatggaaagcagctccttccggtaatgatcggccttttcctgattgccctgttctttccgtaccatctttgtgattcccggatactgtcccgggaagctttccagcatgataccatctccatagattaggtaaacatctccgtctgtcatatcttcctctgtcagcttctttccattctcatccgtaagcttatccggtatcgttccggagaaaatcgtgtccgtgtccagatccgcaaaataccagctgttatcatctgtatgaaaatacactgctgtcatcggcttttccccgcatcccgccagacagaacataacaagtaccgccagcatcacgatccattttttcattattccacctcctagtctctgtcagtatttgattgtttcgacttcacaccgtgctagcaccatgaaaaacattaatattactgacttctacaatgttttttatctggcactaccattagtgggagatttttgatataaatttaattgatcgttggaagtacttccataacctgatcaatcacttccacaattctctgtatatccatattttcttttacatcagaactatcattcacgttcaaaccatcttgccagtcctggacaatagatactgccgggatattcactaatgcaaacggataatggtcactgttggttgccattgtcaggaaaaatctgtcactgggtgtaaatagttctgacatactgtttttatttaattctgccagttttttcaatccctcatcatcatattccgcattgtctggtcttttgtttccttcgatcatcgccatataacccagatcacttttttctgcaatagtatcaatatttattactccgatgatctgtttccgctcgtcccccgtcagcttaccaacataccatcttgaacccagcatatatttctcttcgcccgagaacaggatgaattttatattatacggtatctctgtatcttttaaaatccttgccagttcaagcactgctgccactccggaaccgttatcattggcgcccaccgaatcttctgcactgtcataatgggcacttatgatcagattttttgtagtatcaatggatgagttttttgtcacaatgatattttcaccaatgccgtcaacaattgcatcctcggctgttgatgccagaaacacatccgcctgcgaggaatgccttattgcattctcattgttttcatcgttatattcgaatttctggtattctatattgtcatatcccagattgccaaaatattcactaatatattcttttacattctgtattgcatcagaatttattggacgcggttcagaagtgatttcatcgatgatctgttcaatattctgttccaaaggctctattattgtaccgttctgggtaacactctccgccattgtctgaattggtgctattaatgatataaccataattaaggcaattgtaatttttttcatttgtgagctccctcattttaccaagtattaatcagtatcttttatccaataactttccatgcagaaccataggctacaacgaaagctttttttcataccataaacattatcatgtgatatacttctgccaattaaatctcagattttgaaaaaggaacagacattgataaatttacttagttccattctgggctatgcacggaacattacaaccacatgatcaaaaggcggtaaatctgatattctaaatgtacattgtgatccttttttaacaaaattagcttttttatcatttatgttatcaactgatactattataccatgaactgcatcaccaaccaagtgttcttttttgcttttacagcgttcgtacagtgcttttacaattcattgcacatctgtaaaggaaagagacttcttgctatatattatgttaaattcctgaaagtattttctttgcgttctccaggttattttttccatttatttttagatatactttactgatttcagaaggctctcctatttctctacagagatcctgtgcctgggaaatgggtatgtagattttcctggaacctccgtttctctggctttcttaatgccctcggctgtggcttctatcacgacaaattctttttcattagagtttataaggacatcaatgtgctggcagcagttactttcgctgttctgcctgtcaggataaaagaactggtctacggaaatgtccagcaaggtgacgatttggtaaaaggtattcaggtttgattatgaggacgatacgcagttttatgttttagtagtattttatctacatactcgatgacaacattgatagattgaaagaatggcggtaaaataaatgcggataaaatttgagactccataatagatacatatttctctgctatacttgaaaagttggaggtggaacaatgcagaagattttaattgtcgaagatgatattgacattcaggatatattaaagaaccatctgattgatgcgggatatgaagttgctgttgcttctgacggtgtggcgggcattgcaatgtttggggataccatcgaccttgtgctgttagacatcatgctccctaaaatcgacggctatggtgtatgtgaggtcattcgtaggcggtcacaagtccctattattatgcttactgcgctttcggatgaagaaaatcagttgaagggttttgaacagcagattgacgattacattccaaagcccttttcacccaaaatcctgctgtgcaagattgcggctattcttcgtcgtaggactgtggaaaatcaaaatcaatccctgcttacttataaagagctgagtatggatattgacggattccatgtatatcaaaacggaaacgaggttgttttaaccagcaaagagtttgctcttcttaggcttatgcttgaaaatcagggaaaggtctttactcggcaaatgctgcttgaccgattgtgggcggacgatttggaggtcgaggaacggatcgttgatagtcatataaagaacattcgcaaaaagctgaatgctgactatatcaaaacaatcagaggggtgggatacagaattgacaaagtacattaagcaacggttatccgtcaagatttttataattacatttcttctactgggtgcagcttgcggcggaacatattttttcatttcaaaactgttacctacgacatactccaatttgataaattcggctacggagaaatccgctatgcaccttgttgagcaaatgacatcctttgacaatatatctgattgcgaaaatgacatatctaatttttcaaaggaaacaaatgctgctttttggattgaggatagtaacggtcgtatgatatatcccgacgaggcatcaatggaaacctctactgcttcggcagattgcacagttacattcgatgaagatgaatcgttcatagatatgcaaccgtctggggaaaccacgacaaatttttacccgttcacgttaaaaaacggtactgcttatgaattggcagttcaaacggatttgttcgttgtacagcaggcaacaaaggtattgctgtctattcttccgtatgttatcctaatgatctttctgctttcgctcctttgtgcatggctctatacacggtacatcactcgacctattgtgcgactgagcaagatttcaaagcaaatggcagaattggatttttccggtcaatgtggtacaggacgagaagatgaattagggtgtttggcgcaaaatctaaattcattgtctgcttcgctatccactgcattgaacgaccttcaaactgccaaccaacagctcaaaacagatattgaaaaggaacaggagttagaaagacagcgggtagactttttctcggcagcatcccatgaactgaaaacaccactgaccatcttgaaaggacatttggcggggatgctgaatggagtttgcggttatgaaaaccatatagagtacatggagcgttccctggccgttgttgataggatggaaaagttggtaaaagagctgctgtatgtttctaaagcagagggaactcaaaaatccgaatataaaaccattgattttgcggaaatatttcgggtacagattgccactgtaacagatttattggaagaaaaggaacagtgccttgaagcaaatattcctacccgtctttattgtgaagtggaacaagcacagatggaacgggcaattcaaaatatattggtaaacgcaattcgttattctccaagtggtgaattgattcgtatatctttgtccgaaacacatggcacaattcgtggtgaaattgaaaacacaggtgtccgtgtgcctgacgatgctattccacatttgtttgaagccttctatcgggcagatatatcgcgtaaccgcaatacaggtggaactggattaggactttatattgttcataaaatcatggaaatgcaccaagcaaagtacggcatttcaaatacaaacaatggtgtactgttttggtttgaattgccttgcaggcagccgatagacaactccatctaaaatccataatccttgcaaattatatccaagttgctttgttatattatagctgtcctcaagagggtagctacaatttttagaaagtgaggttttatcaatgaagaacaaaaaaatttggtcaataggactgtgtggagcaatctgtttaagcattgtaggagttacttatgcaagttatgcaagtgcattggcttcggatacaccaaaggtttcaacatacgaaacagtaaacacatccggtaaagatattctctatcaggatacagacggtggacagatcagtgttgacggtaaaaattgggtcgatgaggcagattatgagaaaaacaatacggtaccggatgtgcagtggtggacagctgatgaatatgaggcgtggatgaacgaacagaaaaaagaaatggaatctttgattggaaccggagatggttggtatgatggggaaggcgtattccatgaatttacacaggaaagcgtagctgctatgatggacagctataaaggaactctggaaagtatcaaaaaaggagtattgtattccaaagacaacggtgacggcgatacctactccatgattccacctactgaagatatagtttcctcttatagtattgatgtaacaaaagataacggaaaaacagtacacattggagattattccacagttgaggaattagacaaagccatttctgatgcagttaaaaatggtcagctcacacaagaagaagcggacgccgttcaccaataataaccaaaccattctgccgcacgacggcaaaagaaaaaaagccgtcgtacagcagacaaattgatacacccatttaaagcagcggcattgattttcagatccactgtaccaaacgggcaaaaagcaagaactgcccgggcaacagaaaaatttgaagaaccggacacccgacgccaggccatttcgaaggcgatcgccgaattgctatatattatgttaaattcctgaaagtattttctttgcgttctccaggttattttttccatttatttttagatatactttactgatttcagaaggctctcctatttctctgcagagatcctgtgcctgggaaatgggtatgtagatttcgttgccttctattactacagcggctttacagggcatatatgaggtttgcggtcctcttgcggaattgctggataaggtagtaagatcatctgtggctttggaagtatccttctctttttcatccagggaataaaaaatattcaggttttcacccatctctaaaaatttttcctgttgtttttttgaaatggcatgattattatagtctttcatatcccgtagggaaccatttcccagcaataacaacggcatcttccccagttcattctgagttggattttttccaaacgcattcatatcaattcctgaaaaagtcgttgtttccgtataatcttcaattttgatgacaaccgggacttctatgactggccagatttcttttataccttttatcttcttcgctttctgcaaaaaatcttcatcataagccagatctccaagtgggagcaacacagtaaattgccgtttttcttctttcatgcctgccagcagcattcctaataatgtaagtatcaatgccagcagaagtatgacaaataaggtaaagctgtctattttttttcttttcaatgagaatccgcctttctcacttcttcgagaaggatatttttcttatgaagctttctgaccagaatcaggattatggaaataagcagtactgcaacaactgcaactatggaataccaccagttattggttttctcctggtcatcttcaacctttaaagactttatctgagtttctttgatttcagaatcaaattttatttcctcctcatatgatttgccatcggcatcctcatacgtaagaattaattgacctgcacattttcctgtttttccttttacatatatgcgaagacttccttgggataaatctccggcctctatggtccctaagaatgcagtatcgtttgagcttaattcatcagcctttaagctgacacttgcattgtatattttgtctcttccgagattcattgcttttaccgggatctctactgtatccatagtgtataaaacagatggaatatctgaagcttccagcttaacacgaaccggttggatgatctgaaaagacagtaattctgtaccggtagttgccgttgctttcgaatcttcataatccagagaaaaagtaatgacagcctggccaggatcacagttttctgttatagtaatcatctgttccaaagtaattgcttcaccaggagccaggacttgtacataaaaagagtttttctcaaattcaattcctttgttctctgtagaaagggaaatttttaaaccaaatacattttgactgcagcttttatttcgaaatgtcagcgacatttctgttgtagaaccagcctccaatcgtccacccgaaagattgctgtcttctaataatacctgcggtttatgtaatattttttcacttgatgagtctgatgttgaattacctcctcccccaccgcccgaataccctccgttgtctataaccggatctgttatctgcggggcgtcaccgtcttccggattatcactgtctattacaacatgaaaaggattcgatttagaaccatcaccaaagtcatctcctgatgtaaaaatatccggatccggattttctttatcggtatcagctttatcaggagtcttttcatcctctgccggaggttcggtgctcggaggttcggtactcgtagattcatcctctttttcatcaagggttaacgagttatcattctcataagatacggacggatctgagtccgtaaatccttcttcagcagatgtaacttccgtgttttgaggctctgtggcaaaaacggtagctggaagaaatattattgtcgtacacaatactaatgccgtttttacaaataaatttctcattatcaggcagtcctttctcttaagattcctccatccatttcatatacgtggtcacataagattctgatgtcctcttcattatggcttgccagcaaaatggtttttcctgctgcttttaaatccagcagcagttctcttatttcttccacgccatgtttatccagtccattaaacggctcatccagaatcaaaaacagaggatcttccataatggcctgtgcaataccaaggcgttgacgcattccaagggaatattttccgacgggtttcttcatgtccggatccaatcctaccctttttaagactatgcggatatcggccttcgaaatccggccattcatgtctgccaggatctccagatttttaaagcccgtatattgtgtaagaaaaccgggagtctcgataataactccaagactttcaggaaaatccacatcatggcctattttttttccaaatacaaaaatagtgcccgtagttacaggaagaaacccacagatgcatttcataaggacggtctttcctgaaccgttatttccaacaatcccatagacgttccctgttttcaaggaaagatttacttcctgtaacacgatgtcttcaccgaaacgtttggtcacgtgttctatttttacgcaggtgttctgcatcattccacttgctctttgcggatcacaggccagattaaatgtcccttcagatttcttccaatcttccatataaaacacctcccagaattcccagcattactaataaaaacaacagtagaaatagccaaagtcctattttgtccggtccccaattttcatccgccagtatccattctactggataaaaccatatctgattcttaaaatagcggtcatgaaggataattccgaaataaaagcttacaaaagggattccatatgccatgtaagcagaatcccataaaatcccgcagcttccaccgaaagtacttatgatacttccgataaatcctgtccgaaatgccttcatgagtaagtccagaagtgcttctttctgaatagcaccctttatctccagcggatagaacactataaaattgataaaaagtaccgttagtatagataacgtccagaccataaaaccagataccataatggaaaagactttaccttcgatatactgtctgcgagtcgttctgggaagtatctcctttaaaaatccacttttatattcttgcagaatggaatcactccatggcaatacggctgctaccggaatggcaaaagatactgcctgactttttaaggaaccttccagtatactgataaaagtaccacatgtcagtgctttttttaagctgggataagtctgtccaatggcgatggaaatgcaggctatcagccatgctgccagaaaatttttattaaaaaacatacgttttgtttcaccccacataggttttcccccttccgatcatgtcttttctccaagaaattcaaaggtatattttttcatccggttaattgcaaaaactgcaagaagaactaaaatacccagaaaaaacatataggaatgcgggattttcgggagcaatggatcataacccaagttatgttttccgtatactgcctggttcagaggactgatccagcagattaatacatttacctgatacatttcgtatttttctttatgtaaaattgcagctagtactttcgggtccaataaaaaaccaaaaacactgtaaagaaggccaaaaatcatccccttagtcttccctttatagagatttcctacaaggattacaaagcttaaggtcagcgaataacaaaacagaaggaagaaaacctgcagcatacagccatagggtgagatactttccatgacccttactgtagaagggacctgcaggttttttcctaattctgaataaccaagcatggccgcagtttcgctccacaggttacctggataactctttttcatacacagcacggccgtaaacagcagcatcaaaaccgtatataaaacagttacaagaataacataaatgaattgacctaaaagccatttcctcttggttgtccgggtcagctggtatggagtaataggtgtcatcttcggcaggtcagaaaacataagaagcaagagcagcgaactggacagtactgctatcccatccccaaatgtccagataaatggttcaatggcctgtaccggtgtatcgtaggtctccattacaaccatgattctgcctgtaagcaggaaactaagtacaaattctaacagaaatacaaaaataactttgggattgcgtaaaaatccgaagaaattgtaccttacaattccaaatacctgtctcatgtcagtaacccagattccggtctatgatactgccatccacggcattaatggtaaggaaactttcattcggatctttactggtatttgattctgtttctccgttatattcactttctgaagtcatgctgccgaaaaaatcccagacggggatcaaaatacctgtgtgtgcgtcagtagacggctcatatattctggcataaccaagaacgatccgatcaatattatagatcctggaattttcatattgcatattatcagcgtttgttaccaccatcattttttcataaattttcataatctcgctgaatgaaagaagatttaaattctctgtctttatgttaccaattgtgtagggatttgaataagtcatgctttctatgccatctttatcgacatagaaacagagactttcataagaccatgtttccattgtactatccatatcttccaatgccccaccgtctgcaattgtctgagttaccggcacaccatttatggtacgtgcatagtcaattctatatccatttccaaaattacctgaactattatcgccttcaaaacttttgcacaccgcgtaattccagttagaaaactgtaaatctgtgatgcccattttttcaactttttcctttgcaagtttttttgcttcatccagggacagcccgatagattcttctgtgggtttttcttcctcttcagaatatccgtaatcccaccacattgcatcctccggtattttttccccgcccttgtttgctgctttcttgatcttgactgacaaggtatcggagccatcggaagatattttataatagaattgtgaatcgtctggcatttgtgcaatacaatcgaaaaaatttccggcaacaggttttgcctctgtcagggttttcttttccggagcagtttcgtattcctgttcccatgtctcaatatcttcatagatatcatagacataattcccatcatcgtctgttccatagttatacggatccaggtttccgtttgcaacgtcttcttttagttcatccagagtttttttaatttcatcctttgtcttcacataataactatccatggtataaagttttgcctctgagaagaatgcgtttgtaatacggtcgagaagctcctgggtaacttctgccgcggtgacagaaatagcagatatcttttccacttccggaatttctacgcttgcatctgtatttaccacgagcttggcactgtcatcttccacatggcttttataattttgaggagcatcaatgagattcctgatggttgtctttgactctgaaccgtcatcgttcttgctttcagatgcttctcctttagaaccactaacatcatccgcttccgtataagcatccacagccttgctccccttcggctttaccaaagaagaatccggggtctgtgcgcatcctgtaaacattccaatacaaagcactattcctgcaaactttcttatgttttttctcatttctggtaatatctcctttctaaggttgttataagtatatcatcgagcattacaccaaatctttcgcgatttgtaactgatatgtaaacgttagtgtgattaccagaaaacagagacggtagttccttttcccggattgctttcaatcttcagttggaaatcgtgcagttctataattttctgacataaagaaagaccgagccctacacttccttttgccctggaacgagatttgtctaccatataaaatggttccgtcaccatttccagatcctctttcggtattccctttccaaaatcttgaaccatcagatggtctggggttgcctcaagcacaattttagattctttcctggaagctttgactgcattatcaattagatttgtcactacacttatcattaagtcctgatcgaacttctttaccaattcttttggttcacaaaatacatcaagagagatgtttttttcttgaagcctgcaatcaatgagttcttttacttctttcaggaaattatccacctgtatttcagctggattgaatgagtcttccgaagcttcgtagagtccggttaattccagcattttcatagaaagtcttgaaagcctgcgacattcattttcaatataaatcagagccttctcctgcctttccggggttaggcgcacagtaagcaatgtatctgcatagcctatgattgcagtcattggggtcttcagctcatgagccagacttccaataagctgtttttgtgtccggtttatgttagaaagactttcaatttgttcttttattttacctgtcataaaattaaaggttgcacctacctgcgcaagttctgtattgccctctgacggtactttaaaatcataaataccttcagaaacaagaagcgtagcttctcttaggcttgtaagcggtgctgtgatttttcgaaggctcaaataaaggacaattcccatcaccacgatcaaagataaagtaaatccacccgtctgaaaaaacagcagatgacttttttctattacatctgttatatctttataagtaacaatctgatatcccatatttacattgccatagtaaaataacaaaagtgtccttccatttatctgactgatcatagggccatgaccgtcactgttgctgccatgatccaccatgtttgccttactttcacataattctcttaacttttttacatcgaattcataaacagttccattatagatcatttttccatcaagatataaaaccgcgctgtcatgaaaaacctgccgaaaagcataagtaactatttgggggcgcatttcgttgtcggcattctgtttctgattgtcagaaaggcttgttttattttcaaactgtaagatatttgttctgaatatactgctttcataactgttgatattctgtatactctgatttttccaacaataagtggtatagagaaagatccctgacgataccaacaaaatgatacatgtagtctgagaaaagatctttattaagagtttcataaatccacctcaagtctgtaaccgattctgggaattgttttaatcttatcctgccagccaagctttttcctgatacgacccacatgtgcatccacagttcttgtttctccgcagaactcttcattccacagttcctgcagaatctgattcctggtcagtgctttattcggatttttggcgaacaccatgaggcagttatattccattggctttaaatagatttccatgcccatttttgtaacagtacgactagcagtatcaatgatgacatcaccaatttgaatctgttcttgtacagtgccattacgttccagtactttttcaagacggaccatcacttccagcatttcaaatggttttacaatataatcttctgcaccgtcttttaatccctttatcttgctcgcgatatctccctttgcggtaagaaatattacggggatttcatactgcttcagtttcggtaacaggctatagccgtctcttccgggaagcatgatatctacaagtgcacactgaaacgcatgatcttgaataattgcttcatatgcctcatttccatccagatatcctactgtttcataccctgcaatctccaaattcatacatagcaggtcattgattgacatttcgtcttctatcacaagaattcttgccttcataattattacctcacatgtttttataactatcttttcacaggctaattatacattaaattctataatgcagttgtaactgatttgtaacagcaaaaaaggaaaccaaaaccattctgtgagaatagttctgatttcctgtataaaccgatatgctgattttatacacatgcccaaatcggctttatcagctaataccgccgccagtttttcataaaacgagaataaaagctgatattttcctgtttttttgcacattccttcatacatttctgtatgttttggtagtaagattttgtattgacacctgattctttcacatgataatcaaaaatgcctgacattggatcctggaaaaataacgttatccgaaagctgcgcatggatatccagcattttttcataggttctggtatcagcatgataatagtcccaatatactaatcctagatcttttttcggtttttcccatttggagcagtccgtgttttcgggcagatcatagtatccgcctgtagaatttgctgtaatgtacatgtcactccatatcataggctttaattctaattttctgcaaatatctacgaccctgttacaatgttccctgattatcagtgacccttttttatatccattttcttttagataatttccaagtcccagcatgacagcctcatccattccaatatgtaccctgttggtagaaaaattctcctttactgagctgagcagcttttcaataaactgataagtttcctctttttcaggctggagaatgtccgcagaatcacgaatcttatccattcagacatgctcttgatattgaaattcatcttcttccatatgatgtatggcataattaagtacgcggtaataatgagatatttcccggcagatgatatgaatctggttttttcttttattgatcaatatttctagtctgtcctgaaatttaacaaacaattatatattttggttgaaaccgtcattttcagccagcagtatttcagtaccttttttaatagtattatattctttcttatcagatgaaaaaacaatgttcatacgtattcctctttctttaggaattattctttttatcatatccttccggtatctcataagaatctacttaaggcacgaatcagtttttctgactccagtggttttgtaagataatcgtccattccggctttcaacgctttactcttgtcttctgcaaaggcatttgctgtcatggctataatcaccacagcagatgcatcacttctgttcattgtacgtatttctctagtagcttccaggccatccataactggcatcataatatccatcagaattacattgacctcaccaacacctgattttgcaaatgcttcaacagcctccttaccgtttgaagcccttataatttctgctcctgcatttgtcagaaggaattctgcaatttccatgttcaattcattgtcttcggccaaaaggattctcataccttcaattgatacatcgtcttcctggctttctgcctgcttcatatcagcagaaataaggaatgggagctgtaccatgaatgtggttcctacatttttctcgctttcaaatttaatcgtaccgcccattttctctaccagtttttttgtaattggcataccaagacctgttcctccataaacagatcttgcaccgcctgtttcctgagtaaatggttcaaaaatatggttctgaaattctttactcattccaactccggtatccttgcagtgaaactcaaacagtatatgtctgtcatccacctgtgtttcataatagctgagcagtatctctcctttttctttgttatacttgacagcattacttatgatattcataaggattctttttaaactttaatcacagcacttttgcatgctctgtcaatgtgtttatttccataaataaatttttctttgtacccattatatggttccagtattgatacgtcaatcccattaatgtgccttctcttcttcactctttgtgaaaggaagagattgctagcttttaccaatcgctcttccacttccacatcaagtctgctttgttctggattaccgaaatggtgatcatgcgtcaggctgatactgttgacaatgaaaaacaggagccagctgcattacaacttagctcctgtcctgtacatcttgaatatagaattagtaaaaacagattatcgggacatcatactgaataagactataaagctgtccggcattttctggtggaagattgatgcatccatgagaaccacctgtaagatatctgtcaccaccaaagtacggctgccagtctgcatcatgaaagccaattcctccattgaatggcatccagtacgttaccggctgttcataagaataggttccatttgctgtcatttcacctcgcagcacggacggactgctctttgaattcaatgtgaatattccagggggtgtttttctatccggatcgcttggcagtccggatacgatttctgattggaaaataatatttccattctgataataccacatatactgctctgtaagatctacctctatatatgtatctccgagatcattgatcccgtgtgcatttgccctcatagaatacaccggttccctggttgtctgggttcctgactgaatttcctgcatgagctgtgctacttccttgtcctgatcaatcttccacccataggcagaaccatatacatacacagtccttccgctcgtggtctgaaattgtctttcagtgccaactgtatcatgatctgctgcaagctgtgccacataatccactacgtgctgccggaaggcttcatcattctggagcagctgccctttctcgtcaaactgcagccagtttttgatggtattcccatcgagtgttaccgtttcgtctccaaatgtatatgtgatatttgcttttgtcaggttcttatatgtatttaccatattctgaagttctgaactttctttcgtcacatctgctttcttataagcctttggatcactttccagatttacctctgccgcatcgttatcgattgccctgcatatcatctgataagcttctttggtatttaattcgttgccttccgtttctggcacaatagtgaattctgagttaacaaaacttacatacgcattttccggtgctatctgattctcttttttcgcacaatttaatgaatttacctgttcttccagtttctcccggctgaaaaaagtctcttcttgaaccatatagttttttgtttcaaaaagactgccgatccattcccatgatttctgagttttcagcagctggagaaccgcaccgctggatacgtatttataatcaatgtcttttcctgtaatggcctgcgggtcctgcattcttgcccttacctgaatagtatagttatcctttttcccagcaatctcctgctcaacctcatatgctgtcttatttgaactgtcaatcccattgatggtcgtcccataaaagaagtgatatgagtaataataagatatacctgcatacatacaacagcctataacaaaaatcatcaatataatcaatattacaattttcttaattttatttttcttcttttctgaaaatataatagatctgaattccgatttatccatcggcacataaacaactgaacctggtcttgccgattttgtggttctcattgactgccctatcacttctttttgtctcatatcctacttatctttctttgaatcacttagttttttgcactgtctcactgtcattatcaaaatgtaatgtcttatgatatttcgcattctcctccagaagttttttccatttctgtccgtcttctttcgtaggattatcaaaattctgctgccccttcagttcatccatatactggatataatccaggaaataaatatctactgtcgaaatatccctgtcctgaattgcgaagttattacagtttccagtagactcattatatggaagtgtgtttccgttggcatcaagagctaccatgaagcagtcactgttggatccttccttataaagttcatttaccgtcagttcatacggagaacgaattacggatttgagtccgataccagcatcgtttgtatcattcagttccaatacttctgtccgggaatcatctactgtaaccgggatatcgaaactccagtcaccttcatatttgtagtagccggcatcccttccatagttttcatcatccgcttctgaccactcatagtctgcttccagccctcttaccttcgagatatccagatgcagattaaaagtatccggaatctcaatatctttaatatatttctgatatgctccaccacgctcagatactttattgataaactcttccagcagtgcataaccttcatccgtctgatcatctaagtccgcctgagttattcccatctcatccattacctgctgtgtcatttcattgtatttctcattatattccgtatagtcttttgccgcctgagcaagatcataacggaaaatgcatgcataggtgttgtcatccagaaactgtccttccacatgaccgtcgatcacccgactagcttctgaatcaaagtccacacctccagtcatatccagatcaatgaccggtgttccactttccgccctggttgacgtttctggaaatggcttatcactcttaaaccgcatagttatatagactgcctggctgttggcatatacctcagaacatgtaattgtcagcccatctgctgttttaatgtaagcattctcactagtggcattacctgtcttgtccccatctgcttcactgccatctgccgttgttccatcaacggattccaaggttgttgcataatccgaaaaatcaccaaagaaacttacattatcctgcaagatttcaaaaagccctcctacaaccggaatattctttgccattactggattggttgcacagaatataaatccgactgccagtaccgctgccatacctcctgctaccctgcctccaattttcatccagtgatatggatcctttggtgcttttttctgtaacacagcattattttcaatcaatcgatatgcctgattgatacgttcatgcacgattgccggcatttctgtatccttttgaagtttttcctggaagtctttctcattattatttaaagtcatcattaaacacgtccctccttaaccttatatccatacatctctgcaatctgttttctaccacgatgaagacgagatttcacagtgctttccttcatatccagagcgtcactgatctcccggacactaaatccttccatatagtacaaaagaacaaccaaacgatatttgctatccaatgtttctaatacttgtgcccattccatcgccgcatattcttcttcgtgaaaaggtgtttccggcatctgatccgtataagtaaccagctttttcttctgtatcatgtccttacacttgttgatcaagattcgaatcatccaagttttaaaatatctgttctgtttcagacttttcagattttcataacaggaaagaatcgtatcctgtattgcatccgcaacatcttcatcatttttcagatatgctgccgcaatcttatacatactctgtacattctcatccataagtcggcagaaagcatctttgtcgcctttcttcgcttttcgtatcaaaacctcattcattgtagttccggctctcctatctcagactagtcatccgtagtatactatagaagcttcatttatgtgcttctacttattagacgtgcgaatccctaaaaaggttgcaaatatttttaaaaaaattatctcagataaaaacacccccgaaatcgttcaaattttatgatcatcaggtcctattagggtataaaaacagccgtaccatgtgcgttttacatgatacggctgtcaataattctcataccctcaggatagattaattgaatcgccaactaagactctccatttttatttatgtaataaagtttgatccagcatgtttttaatttcatccggaagactgtctatcattgcattttcatccaaaaacagtaaagttgtatattttttcgcatcattcggtgctgagaaaatatgagttactgtatatgctgttgtacttttagaaaaacaatcttcatctcgcagtgattctactacaaagcaatcgcctttttgctgtccctgatcatcatactctttatttaagcatagagtaaaattaagatctgttgtgccaaacttataagttctcgtatctgtaacaatctcttccaacataaagccttctgagccagccagcattgcaatctgtccgatatgcttaattttacgcttacacaatgaaaaagggtgctgcggtgtaaaaaatatctgagaagcctgaagcagtttttttgctgcataactataaaacttttttgcggaaaggtttgtggccacacctgttaagtgcctgaaattggcagctttataaagcacctcaatatatctgccttcaaatacatatagaaatcttttacctactaaatgcttcctatacagatcggcagctattttaatctcctgtacgattttctctctatcctgttgttttcccatctatcttttcccaatcatcactataatataaaaacagcaccggacaactttttgttatccagtgcccataatcttaaaaagcggttttatgctggctgtcagccgcgacatccttccgaacgtctaaaatgtcgccggtatcattaagtccccggcgcggactcaccgtatctccctggtgtgggcgtaatacccttccgagtatcaaatagtcccagtaattaccctgcccgggcacagtacagcttttacgtgccgctacacgaaaccttttggtttaactatattatatgcgataccctaagaaatatcaatagtttctggcaaaatcgattggctgtattttattgtaccccattacttaccactgtctatgatttccaggccctcaggacagatcaatcaaaaatcatattctctgtcccatcaggttttaaaaatactgttttcgaaattccattgcattccagcgttactttctgctcacgggaagaacagaggcgaaccctgtgtatcctgccctctctccattcaaaatcaactgtgatgtcaccctgtgccttcattcccccgacttttccgtctttccactcatccggaagtgccggaagcaacaggaaatgccctttcctgctctggataagcatctctgcaactgcagctgcaaagccaaaattcccatcgatctggaacggagggtgtgcacacaacatgttgggataaatgccgcctcccacacaggagatattttcctccctggtataacggagctggtttgatcgagtaggagacggcttttgccgccgacctctcacaccaccggacatgcggttccgcatccggcggttcagttaacttgacatctcgctttacaaagatattcctcggctgagagtaaaccaaatttcttcaaacgtgcatttgacatcgcataacaaacagtttttgtacggcacactcgggcatatccatgaaatcccgccgcacactttgcattctttttactaatacccagttttaccaaatttttatatctggtttttggatttttccagtgtttccatatgcacatcctgaatctatacctgattactgtatcaagttttcggcttactgtaagaattgagccaattttaaagtaattaatccatcctcttactacctctgctatctttttcgctttgtatgaattactcacgctccacttgcagctcgtaagtttcctgactttcttctttactttatccaatgactttttcggaactttcatcctatatttcttttcctaaaattgataataaaaagcaaatcccagatattttgcttttgtcgtactatcattatacttttttattataaaaaaatacataaacaacattcgccaaaacatgcacaaaatgttatacttttacataatagccaactattttttaacaatattttgtagaatcgtaaaattgcataattcatattgttgtattttgtgcaatatgacaaggaagacattacttgtatacattatcagcatactatcacaaatccagggttgattttatggataaaaaacatcccctgtttattggaagctgcggtacttatcatctatacaccgtagaaaagcttcctacccaccgcccgaaagaccggcttgattatcagcttctttacatcgcatccggacgggcacatttttattttgatggaaaacctactgttgtagaagccggcaatatgatactctaccgtccacgtgaggaacaacgctattattatggagcggatcagaccgaagtttactgggttcactttactggaaataatgtaaagaactttctgagaagatatgggattgccgacgatacccgcattatttataccggtatctccattgagtacaaaaatctatttatgtctatgatcgaggaactgaatctgcagcgaattgattacgaggagatgctgataaattatttcacgattctcctgatcaacctccatagaatagcactgcaaaagccacgtaaaaagaaccttcagaacatgaacgatatggaacaggctgcacagtactttcggatgcattataataaacctataagtattgaggactatgctgtttcccacaatatgagtatcagctggttcatccagaacttccgtcagtatgccaatactacacctgctcaatacgtgcagtctctgaggcttaccaatgcaaaaatgcttctggaaacgaccaattataatatcacagaaatagccaacctggtcgggtacgagaatccattatatttcagccgctttttccgaaaacagtgtggcatttccccttcacagttccgcaaacagctggtgccgaatgcagaaagctgtccaaaataaaaccaatcaaaaacgctgggagcaattctcagcgtttttgattggttttatttaacataatattatgatactttttttaccttagaattaatggacatagagcctgtttcaggatgtcgcggataaatattcttatacctgtaagtactcagcacgatccccatgagtccataagaaattatgatacagcttcctccggctgaaaaaaacggaagaaatgttattgattgcggaaatacgccaagattctcaaggacatttatcaaaaaactgatgagaaatacaattccgcacccgcatcccatcatcatgcccagctgatttttctgtcgtaatgcagtgttgaagactgcaaaaatcagaaccgcaagaacacagcacaaaagtatagctgcaattattccatatacagatgacagataggtcagaatgtaatccgcattaaatgctggcaggattcccgttacatctgatttgcttttcccgatcagcttattttgtctccaaagtgaatgcaacatttttgtgagatagtctgtttcgctgccgctggaaaatatcgcctgtatgcgcgcaatttgatattccgccagcctgtttctcaggtacatactcagaaaagctgctatgggcgcggtcaaaaacacagcccatattccacagatagttcttttctttctgactgtaaaccagtcctttttgattgcgatcgtcaacatagtcagcatagttaccagcatcacacaagctgtcctgagtgccggcaggctgtaaactaatattactggagcaatcagccataagattgctcttatcagtcccttatatccccacccatgatatttatataaaatcgccccatatatagggacataaaacagcatcagtttttgtacatccatgcctcttctgcctcccggcagtgatataaaaatcctcgctccgtttacctggcctccttccaatataaccagcaaacagacggccaataaaacagctgcaattatttttgaaaattttgccagtacggtatagtccagcagatacaaaatcatcatgacagccagcccgatcataacatgaaacacatatctgtcagaaccggctaccgcattctcactggcttttccggaaatccctgcatgtatcagaacacctgcaatgctgataaatataattattcccaaaagtttccatgcagcctgaggtctgtggatactgtcaagggagattcctgtttccacaggatcccccatgtctctgacagcttccttctctgcctgttcatgatccatgcctgccttcatgttttccgcaatctgatcctccatatgatcctgcagttcctgttttatgtatggtctggcttttgtgcagcgaatttgttccagcaataatttcagatatgcgtccataactcacacctccaatataagcacattggtcactgctgcagaatactctttccattcctctattttcttttcaaggaatcctcttccctgtctggtaaggctataatactttctggtctttccagctacatcctgttcatatactgtcaggagtcctttctcttccaggctgtgcagcaatggataaagagttcctgccttcagctcaaatacattctgagatttttgcctcagtgtgtcgatcatctcatatccatacatatccttttcagacaaaagtttcattacaagcattgccatacttcctgaaaccaatgctctttcaatagccatctggtccacccccttcttagaataaactatatatcgacgttctatatatcggttgtctatataatagattattttacgttatttgtcaatatatcaataagatttatcaaaaattttatattttatatctaatttttgattatccgcatagatactatactttcacgtattttgaagtatagaaaaactatagaaaatcattcattataccacgatttgcattgtagaacaaatgtttttttattttgcaattcatctcccacctgtagaggaaggagaattcttgctatatattctgttaaataccttacggctggacatgctctacggaaaaggcttccttgcaatcctcccaatgcgtattgtaaagaacttgatcatgtggccaactgattacatatatttgaaaatatataatcttagtgatatcaaataaaaaacgcgaatattccagtgcttaataagccactgatattcgcgtttcttattatcctaaccacttgaaagat
